(19) United States
(12) Patent Application Publication
(10) Pub. No.: US 2019/0382830 A1
(43) Pub. Date: Dec. 19, 2019

(54) A SIMPLE ONE-STEP REAL-TIME MOLECULAR SYSTEM FOR MICRORNA DETECTION

(71) Applicant: AGENCY FOR SCIENCE TECHNOLOGY, TECHNOLOGY AND RESEARCH, Singapore (SG)

(72) Inventors: Sherry AW, Singapore (SG); Yin Nah TEO, Singapore (SG); Stephen Michael COHEN, Singapore (SG); Melissa Xue Mei TANG, Singapore (SG)

(21) Appl. No.: 16/079,992

(22) PCT Filed: Feb. 24, 2017
(86) PCT No.: PCT/SG2017/050086

§ 371 Date: Aug. 24, 2018

(30) Foreign Application Priority Data
Feb. 24, 2016 (SG) 10201601384T

(51) Int. Cl. C12Q 1/6816

(52) U.S. Cl. CPC C12Q 1/6816; C12Q 2600/178

(57) ABSTRACT

The present application discloses an isolated nucleic acid sequence for detecting the presence of a target nucleic acid sequence, a ribozyme for detecting the presence of a target nucleic acid sequence and uses thereof.

### CROSS-REFERENCE TO RELATED APPLICATIONS

[0001] This application claims the benefit of priority of Singapore provisional application No. 10201601384T, filed on 24 Feb. 2016, the contents of it being hereby incorporated by reference in its entirety for all purposes.

### FIELD OF THE INVENTION

[0002] The present invention relates to molecular biology in particular molecular sensor. In particular, the present invention relates to a molecular sensor for the detection of a target nucleic acid sequence, specifically, a target miRNA.

### BACKGROUND OF THE INVENTION

[0003] MicroRNAs (miRNAs) are short, non-coding RNAs that regulate many important biological processes in development, physiology and disease. miRNAs are often involved in regulatory feedback loops, where aberrations in cellular processes trigger miRNAs to act to restore target levels. Therefore, the ability to respond dynamically to changing conditions is inferred to be an essential function of miRNAs. miRNAs are also an emerging class of biomarkers, which are misregulated in cancer and neurodegenerative diseases. miRNA expression signatures have shown promise for use in prognosis and as predictors of clinical response. Therefore, tools for the detection and quantification of miRNAs have broad applicability.

[0004] Current methods to detect miRNAs include northern blotting, amplification-based methods such as real-time polymerase chain reaction (PCR), rolling circle amplification and isothermal amplification, deep sequencing, as well as hybridization-based techniques such as microarrays and in situ hybridization. These methods are suitable for the detection of purified RNA in vitro. To study miRNAs in vivo, quencher-fluorophore based systems such as molecular beacons have been used. These nucleic acid-based probes require additional delivery agents for efficient cellular uptake. For instance, polyethyleneimine-grafted graphene nanoribbons were used to deliver LNA-modified molecular beacon probes to detect miR-21 in HeLa cells. An alternative approach involves the use of genetically encoded sensor transgenes with miRNA target sites introduced into the 3′ UTR of a GFP reporter. Down-regulation of the sensor therefore reports miRNA activity. This approach allows for good spatial resolution to visualize miRNA activity in vivo, but has limited capacity for temporal resolution of miRNA dynamics, due to the relatively slow turnover of the GFP reporter.

[0005] Thus, there is a need for the provision of improved molecular sensors, system and methods which can be used for the detection of miRNAs.

### SUMMARY OF THE INVENTION

[0006] In the first aspect, the present invention refers to an isolated nucleic acid sequence for detecting the presence of a target nucleic acid sequence, wherein the isolated nucleic acid sequence is capable of forming bimolecular interactions with the target nucleic acid sequence, wherein the isolated nucleic acid sequence forms a ternary complex stabilizing a detection agent when binding the target nucleic acid sequence and wherein the isolated nucleic acid sequence comprises the following structure:

[chemical structure]

wherein A and B are domains forming stabilizing secondary structures, wherein C₁ and C₂ are domains that bind to the target nucleic acid sequence, wherein R₂ and R₄ are regions of nucleic acids that do not bind with the target nucleic acid sequence, and wherein R₃ is a region of nucleic acids capable of stabilising a detection agent upon the isolated nucleic acid binding to the target nucleic acid sequence.

[0007] In the second aspect, the present invention provides a method of detecting a target nucleic acid sequence in an animal, wherein the method comprises using the isolated nucleic acid sequence of the first aspect.

[0008] In the third aspect, the present invention provides a method of determining if a subject has a disease or is at increased risk of developing a disease, wherein said method comprises providing a sample comprising nucleic acids from a subject and detecting one or more target nucleic acid sequences that bind to the isolated nucleic acid of the first aspect.

[0009] In the fourth aspect, the present invention provides a method of treating a patient which has a disease or is at increased risk of developing a disease, wherein said method comprises (i) providing a sample comprising nucleic acids from a patient and detecting one or more target nucleic acid sequences that bind to the isolated nucleic acid sequence of the first aspect, and (ii) administering to the patient one or more therapeutic agents for the treatment of the disease associated with the one or more target nucleic acid sequences detected in (i).

[0010] In the fifth aspect, the present invention provides a kit comprising the isolated nucleic acid of the first aspect and a detection agent described herein.

### BRIEF DESCRIPTION OF THE DRAWINGS

[0011] The invention will be better understood with reference to the detailed description when considered in conjunction with the non-limiting examples and the accompanying drawings, in which:

[0012] FIG. 1A shows a bar chart of the fluorescence levels of Pandan bantam miRNA sensor used with different miRNA samples. The sequences of the different miRNA samples are listed in FIG. 1B. The y-axis represents the fold increase in the fluorescence level as compared to the DFHBI control. The bars represent, from left to right, the following experimental setups: DFHBI control (negative control); Pandan bantam miRNA sensor+DFHBI; Pandan bantam miRNA sensor+DFHBI+10 μM bantam miRNA; Pandan bantam miRNA sensor+DFHBI+10 μM of a random 18 nucleotides long miRNA; Pandan bantam miRNA sensor+DFHBI+scrambled mRNA. The results demonstrate that a fold increase in the fluorescence level of the Pandan bantam miRNA sensor only occurs when the target bantam miRNA is present in the sample. The data presented in FIG. 1 is only illustrating that in the absence of the target miRNA, the sensor will not show any significant increase in fluorescence level. The sensor used in the experiments illustrated in FIG. 1 is an intermediate form of the sensor, that does not include the variable stem-loop P4. This sensor could be optimized to arrive at the final Pandan sensor design by incorporating the variable stem-loop P4, which shows a more significant fold increase in fluorescence levels, as shown in FIG. 2 (80 to 100 fold increase when the Pandan bantam sensor binds to 1 μM bantam miRNA).

[0013] FIG. 2 shows a bar chart of the fluorescence levels of 1 μM Pandan bantam-5p miRNA sensor used with different miRNA samples. The y-axis represents the fold increase in the fluorescence level as compared to the DFHBI only control. The bars represent, from left to right, the following experimental setups: DFHBI alone (negative control); Pandan (positive control); Pandan bantam-5p miRNA sensor+DFHBI; Pandan bantam-5p miRNA sensor+DFHBI+1μM bantam-5p miRNA; Pandan bantam-5p miRNA sensor+DFHBI+0.1 μM bantam-5p miRNA; Pandan bantam-5p miRNA sensor+DFHBI+0.01 μM bantam-5p miRNA. The positive control is a Pandan RNA molecule, with the bantam miRNA encoded with its cognate Pandan sensor as one continuous molecule. The sequence of the positive control thus consists of the Pandan sensor at the 5′ end and the bantam miRNA at the 3′ end. The results demonstrate that a significant fold increase in the fluorescence level of the Pandan bantam-5p miRNA sensor only occurs when the target bantam-5p miRNA is present in the sample, and the fold increase depends on the amount of target miRNA present in the sample.

[0014] FIG. 3A illustrates the structure of stem loop 3 (SL3) of an exemplary Pandan sensor, Pandan 263a, with (right panel) and without (left panel) an extension in the stem, and a bar chart of the fluorescence levels of 1 μM Pandan miR-263a sensor with or without an extension of the stem in SL3, used with different miRNA samples. The y-axis represents the fold increase in the fluorescence level as compared to the Pandan miR-263a sensor+DFHBI control. The pairs of bars represent, from left to right, the following experimental setups: Pandan miR-263a sensor alone; Pandan miR-263a sensor+DFHBI control (negative control); Pandan miR-263a sensor+DFHBI+1 μM miR-263a; Pandan miR-263a sensor+DFHBI+0.1 μM miR-263a; Pandan miR-263a sensor+DFHBI+0.01 μM miR-263a. The left bar in each pair represents the fluorescence level when the Pandan miR-263a sensor without the extension in SL3 is used, while the right bar in each pair represents the fluorescence level when the Pandan miR-263a sensor with the extension in SL3 is used. The results demonstrate that extending the stem loop in SL3 improves the strength of the Pandan sensor signal for the detection of miR-263a.

[0015] FIG. 3B illustrates the structure of stem loop 3 (SL3) of another exemplary Pandan sensor, Pandan bantam, with (right panel) and without (left panel) an extension in the stem, and a bar chart of the fluorescence levels of 1 μM Pandan bantam miRNA sensor with or without an extension of the stem in SL3, used with different miRNA samples. The y-axis represents the fold increase in the fluorescence level as compared to the Pandan bantam miRNA sensor+DFHBI control. The pairs of bars represent, from left to right, the following experimental setups: Pandan bantam sensor+DFHBI control (negative control); Pandan bantam sensor+DFHBI+1 μM bantam miRNA; Pandan bantam sensor+DFHBI+0.1 μM bantam miRNA; Pandan bantam sensor+DFHBI+0.01 μM bantam miRNA. The left bar in each pair represents the fluorescence level when the Pandan bantam miRNA sensor without the extension in SL3 is used, while the right bar in each pair represents the fluorescence level when the Pandan bantam miRNA sensor with the extension in SL3 is used. The results demonstrate that extending the stem loop in SL3 improves the strength of the Pandan sensor signal for the detection of bantam miRNA.

[0016] FIG. 3C illustrates the structure of stem loop 3 (SL3) of another exemplary Pandan sensor, Pandan miR1000, with (right panel) and without (left panel) an extension in the stem, and a bar chart of the fluorescence levels of 1 μM Pandan miR1000 sensor with or without an extension of the stem in SL3, used with different miRNA samples. The y-axis represents the fold increase in the fluorescence level as compared to the Pandan miR-1000 sensor+DFHBI control. The pairs of bars represent, from left to right, the following experimental setups: Pandan miR-1000 sensor alone; Pandan miR-1000 sensor+DFHBI control (negative control); Pandan miR-1000 sensor+DFHBI+1μM miR-1000; Pandan miR-1000 sensor+DFHBI+0.1 μM miR-1000; Pandan miR-1000 sensor+DFHBI+0.01 μM miR-1000. The left bar in each pair represents the fluorescence level when the Pandan miR-1000 sensor without the extension in SL3 is used, while the right bar in each pair represents the fluorescence level when the Pandan miR-1000 sensor with the extension in SL3 is used. The results demonstrate that extending the stem loop in SL3 improves the strength of the Pandan sensor signal for the detection of miR1000.

[0017] FIG. 3D shows a bar chart of the fluorescence levels of 1 μM Pandan sensor with different extension lengths of the stem in SL3, used with 1 μM of different miRNA samples. The y-axis represents the fold increase in the fluorescence level as compared to the respective Pandan sensor without any extension in SL3 used with the same miRNA sample. The groups of bars represent, from left to right, the following experimental setups: Pandan miR-1000 sensor+1 μM miR-1000; Pandan miR-263a sensor+1μM miR-263a; Pandan bantam-5p sensor+1 μM bantam-5p. The left bar in each group represents the fluorescence level when the Pandan sensor used has an extended 6 nucleotides-long stem in SL3. The middle bar in each group represents the fluorescence level when the Pandan sensor used has an extended 9 nucleotides-long stem in SL3. The right bar in each group represents the fluorescence level when the Pandan sensor used has an extended 12 nucleotides-long stem in SL3. The results demonstrate that further extensions of the stem in SL3 beyond 6 nucleotides long do not further improve the Pandan sensor signal.

[0018] FIG. 3E shows a bar chart of the fluorescence levels of 1 μM Pandan sensor with different extension lengths of the stem in stem loop 4 (SL4), used with 1 μM of bantam-3p miRNA. The y-axis represents the fold increase in the fluorescence level as compared to the respective Pandan sensor without any extension in SL4. The groups of bars represent, from left to right, the following experimental setups: Pandan bantam-3p sensor+DFHBI only (negative control); Pandan bantam-3p sensor+DFHBI+1 μM bantam-3p miRNA. The left bar in each group represents the fluorescence level when the Pandan sensor used has an extended 7 nucleotides-long stem in SL4. The middle bar in each group represents the fluorescence level when the Pandan sensor used has an extended 10 nucleotides-long stem in SL4. The right bar in each group represents the fluorescence level when the Pandan sensor used has an extended 13 nucleotides-long stem in SL4. The results demonstrate that extending the stem loop in SL4 does not improve the strength of the Pandan sensor signal.

[0019] FIG. 3F shows a bar chart of the fluorescence levels of 1 μM of different Pandan sensor with extension length of 6 nucleotides in the stem of SL3, used with 1 μM of different miRNA samples. The y-axis represents the fold increase in the fluorescence level as compared to the respective Pandan sensor with DFHBI (negative control). The groups of bars represent, from left to right, the following experimental setups: Pandan sensor+DFHBI; Pandan sensor+DFHBI+1 μM dme miRNA. The first bar in each group represents the fluorescence level when a Pandan sensor targeting dme miRNA124 is used. The second bar in each group represents the fluorescence level when a Pandan sensor targeting dme miRNA14 is used. The third bar in each group represents the fluorescence level when a Pandan sensor targeting dme miRNA1 is used. The fourth bar in each group represents the fluorescence level when a Pandan sensor targeting dme miRNA184 is used. The fifth bar in each group represents the fluorescence level when a Pandan sensor targeting dme miRNA252 is used. The results demonstrate that extending the stem loop in SL3 improves the strength of the Pandan sensor signal for the detection of drosophila miRNAs.

[0020] FIG. 4A shows a bar chart of the fluorescence levels of 1 μM Pandan bantam-5p miRNA sensor used with different miRNA samples. The y-axis represents the fold increase in the fluorescence level as compared to the Pandan bantam-5p miRNA sensor+DFHBI control. The groups of bars represent, from left to right, the following experimental setups: Pandan bantam-5p miRNA sensor+DFHBI control (negative control); Pandan bantam-5p miRNA sensor+DFHBI+1 μM bantam-5p miRNA; Pandan bantam-5p miRNA sensor+DFHBI+0.1 μM bantam-5p miRNA; Pandan bantam-5p miRNA sensor+DFHBI+0.01 μM bantam-5p miRNA. The left bar in each group represents the fluorescence level when the synthesized target bantam-5p miRNA is used. The middle bar in each group represents the fluorescence level when the bantam-5p miRNA with two nucleotides mutation is used. The right bar in each group represents the fluorescence level when the bantam-5p miRNA with three nucleotides mutation is used. The results demonstrate that the Pandan bantam-5p miRNA sensor can strongly differentiate between the target bantam-5p miRNA and the bantam-5p miRNA with mutations. The sequences of the bantam-5p miRNA with and without mutations are listed in FIG. 4B.

[0021] FIG. 5A shows a bar chart of the fluorescence levels of 1 μM Pandan snoR442 sensor used with RNA samples with different amount of snoR442 small RNAs. The y-axis represents the fold increase in the fluorescence level as compared to the Pandan snoR442 sensor+DFHBI control. The groups of bars represent, from left to right, the following experimental setups: Pandan snoR442 sensor+DFHBI control (negative control); Pandan snoR442 sensor+DFHBI+1 μM snoR442 small RNA; Pandan snoR442 sensor+DFHBI +0.1 μM snoR442 small RNA; Pandan snoR442 sensor+DFHBI+0.01 μM snoR442 small RNA. The left bar in each group represents the fluorescence level when a Pandan sensor targeting part 1 of snoR442 small RNA is used. The middle bar in each group represents the fluorescence level when a Pandan sensor targeting part 2 of snoR442 small RNA is used. The right bar in each group represents the fluorescence level when both Pandan sensors targeting part 1 and part 2 of snoR442 small RNA are used in equal amount. The results demonstrate that Pandan sensors designed against each half of the snoR442 miRNA can be used to detect full length snoR442, and that these two Pandan sensors can be used in combination to increase the overall signal derived from the same amount of the target snoR442 miRNA. The sequences of full length snoR442 miRNA as well as the first and second half of the snoR442 miRNA are listed in FIG. 5B.

[0022] FIG. 6 illustrates Pandan structure and sensor design strategy. FIG. 6A represents the computationally (mFold) predicted structure of the Spinach sensor. FIG. 6B is a simplified 2D representation of the solved crystal structure of Spinach2 sensor. FIG. 6C is a detailed 2D representation of the solved crystal structure of Spinach2 sensor. As the helices were differently named in the two solved structures, for consistency, the paired regions are named P1, P2 and P3. Dashed circled Gs form the top tetrad of the core G-quadruplex region and solid circles highlight the bases in the base triple that is required for Spinach folding. Solid grey shading highlight the bases in each structure that correspond to Stem-loop P3, and checkered grey shading highlight the bases in each structure that correspond to Stem-loop 2 of the predicted structure in FIG. 6A. The grey arrowhead in each structure indicates the position where SL P3 5′ was inserted, and the black arrowhead indicates the position where SL P3 3′ was inserted (See FIG. 7). Adding another stem loop (stem-loop P4, as shown in FIG. 8) to Spinach2 allows the new molecule to function as a sequence-specific sensor.

[0023] FIG. 7 illustrates features of the Pandan sensor design. FIG. 7A shows fluorescence intensity fold change of DFHBI+Spinach2 and modified versions of Spinach2 compared to the DHFBI-only control. All samples contained DFHBI. Schematic structures of the different RNAs are shown. Arrows indicate the position of the inserted partial T7 transcriptional start site, GGGA. FIG. 7B shows fluorescence intensity fold change of sensor designs testing the addition of extra adjacent stem-loop sequences 5′ and 3′ of SL P3 (positions indicated in arrowheads in FIG. 6A to C. Dup SL P3 indicates insertion of a second copy of the SL P3 stem-loop. New SL indicates insertion of an independent randomly chosen sequence of the same length. All samples contained DFHBI.

[0024] FIG. 8 is a diagram showing the single-molecule version of Pandan with the 5′ and 3′ ends in the added stem-loop P4. The addition of the new stemloop P4 allows it to act as a sensor for the detection of the target RNA. Shading is consistent with FIG. 6A to C. The GGGA partial transcriptional start site is boxed. SL P3: Stem-loop P3; SL P3 T7: Spinach2 with an additional GGGA partial T7 transcriptional start site in SLP3; CP Spinach2: circularly permuted (CP) Spinach2. Fluorescence intensity fold change shown is with respect to DFHBI-only controls. Cartoons used in FIGS. 7A and 7B are based on the simplified 2D structure as shown in FIG. 6B.

[0025] FIG. 9 demonstrates that Pandan is a bimolecular miRNA sensor. FIG. 9A illustrates that absence of the target miRNA prevents duplexes P3 and P4 from forming, hence destabilizing the G-quadruplex and base triplet required for proper folding and binding of DFHBI. FIG. 9B shows that pairing between miRNA and sensor backbone in stem-loops P3 and P4 allows for stable complex folding with DFHBI. The arrow indicates the second unpaired Uracil (U) 3′ of SL P3, 5′ of SL P4. The GGGA partial transcriptional start site is boxed. Shading is consistent with FIGS. 6A to C. The target miRNA is shaded in solid grey. Sequences complementary to the target miRNA are in dashed boxes.

[0026] FIG. 10 illustrates sequence-specific miRNA detection by Pandan sensors. FIG. 10A shows fluorescence intensity fold change of Pandan sensors for several different miRNAs compared to each respective sensor+DFHBI alone. FIG. 10B shows fluorescence intensity fold change of Pandan sensors as a function of miRNA concentration for miRNAs from FIG. 10A. All samples contained DFHBI. FIG. 10C shows fluorescence intensity fold change of 1μM bantam-5p Pandan sensor in the absence or presence of 1 μM bantam-5p miRNA, compared to that of 1 μM Spinach2, 1 μM CP Spinach2 and 1 μM Pandan bantam-5p-IN (where the sequence of bantam-5p miRNA is encoded into Pandan as one continuous molecule). Fluorescence intensity fold change shown is with respect to DFHBI-only controls. All samples contained DFHBI.

[0027] FIG. 11 demonstrates the parameters affecting the selectivity of Pandan sensors. FIG. 11A shows fluorescence intensity fold change of Pandan sensors for bantam-5p and miR-1000 miRNAs tested with target and non-target miRNAs. FIGS. 11B and 11C show fluorescence intensity of Pandan sensors for bantam-5p, miR-263a and miR-1000 miRNAs tested with perfectly complementarity and sequence modified miRNAs. FIG. 11B shows the effect of mutating three residues in the miRNA 5′ end. FIG. 11C shows the effects of single residue mutations at different positions in the miRNA. Sequence changes are underlined. FIG. 11D shows the performance of the bantam-3p Pandan sensor with increasing fold excess of competing Drosophila total RNA, expressed as a percentage of raw fluorescence of sensor with bantam-3p in the absence of competing RNA. The presence of up to 1000-fold of competing RNA did not decrease the ability of bantam-3p sensor to detect bantam-3p (P>0.05). Fluorescence intensity fold change shown is with respect to sensor+DFHBI-only controls (negative control without miRNA). All samples contained DFHBI.

[0028] FIG. 12 shows a schematic representation of the structure of a Pandan aptamer before the target nucleic acid sequence is bound. Region R3 represents the core structure (solid circles represent the nucleotides in R3), C₁ and C₂ represent the variable domains which complementarily bind to the 5′ and 3′ ends of the target nucleic acid sequence (circles represent the nucleotides in C₁ and C₂). Domains A and B represent the variable domains that could form stabilizing secondary structures (dashed circles represent the nucleotides in Domains A and B). The schematic representation is an illustration of the structure only, the number of circles in each region and domain does not necessarily represent the exact number of nucleotides in each region and domain.

[0029] FIG. 13 shows a bar chart of the fluorescence levels of Pandan bantam-3p sensor used with bantam-3p target miRNAs with different nucleotides in the middle unbound region of the target miRNA. The y-axis represents the fold increase in the fluorescence level as compared to the Pandan bantam-3p sensor+DFHBI control. The bars represent, from left to right, the following experimental setups: Pandan bantam-3p sensor+DFHBI+bantam-3p miRNA without mutation; Pandan bantam-3p sensor+DFHBI+bantam-3p miRNA with U to G mutation; Pandan bantam-3p sensor+DFHBI+bantam-3p miRNA with U to C mutation; Pandan bantam-3p sensor+DFHBI+bantam-3p miRNA with U to A mutation. The nucleotide sequences of the target miRNAs are presented in the table in FIG. 13. The two unpaired nucleotides in each target miRNA are underlined, and the sequence change of the 3′ unpaired nucleotide is in bold. Binding with target miRNA having a cytosine (C) at the second unbound nucleotide position gives the Pandan sensor the highest fluorescence fold increase over the negative control (above 60 folds), following by uracil (U) (about 55 folds), followed by adenine (about 35 folds). Binding with target miRNA having a guanine (G) at the second unbound nucleotide position gives the Pandan sensor the lowest fluorescence fold increase over the negative control (about 10 folds). The results demonstrate that the sensor can function regardless of the identity of the second unbound nucleotide in the unbound region of the target miRNA. (Comment: FIG. 13 shows that fluorescence is even better when the nucleotide is a C and pretty good when it is an A. Even when it is a G, there is still 10 fold fluorescence change. However, this one example is not sufficient to extrapolate as it could be context dependent. It merely shows that that that nucleotide is not restricted to a Uracil (even though all the sensors we designed have a Uracil is that position as you can see from the sequences we provided).

### DETAILED DESCRIPTION OF THE PRESENT INVENTION

[0030] The present invention provides a simple one-step molecular system for the detection of miRNA.

[0031] In a first aspect, the present invention refers to an isolated nucleic acid sequence for detecting the presence of a target nucleic acid sequence, wherein the isolated nucleic acid sequence is capable of forming bimolecular interactions with the target nucleic acid sequence, wherein the isolated nucleic acid sequence forms a ternary complex stabilising a detection agent when binding the target nucleic acid sequence and wherein the isolated nucleic acid sequence comprises the following structure:

[chemical structure]

wherein A and B are domains forming stabilizing secondary structures, wherein C₁ and C₂ are domains that bind to the target nucleic acid sequence, wherein R₂ and R₄ are regions of nucleic acids that do not bind with the target nucleic acid sequence, and wherein R₃ is a region of nucleic acids capable of stabilising a detection agent upon the isolated nucleic acid binding to the target nucleic acid sequence.

[0032] The structure of the isolated nucleic acid sequence of the first aspect can further comprise regions R₁ and R₅, wherein R₁ is upstream from domain A and R₅ is downstream from domain B, and wherein R₁ and R₅ are regions of nucleic acids that do not bind with the target nucleic acid sequence and are capable of forming secondary structures.

[0033] The term “nucleic acid sequence” as used herein refers to a polymeric form of nucleotides. It may be in the form of RNA or single-stranded DNA, that comprise purine and pyrimidine bases, or other natural, chemically or biochemically modified, non-natural, or derivative nucleotide bases. References to single stranded nucleic acids include references to the sense or antisense strands. The backbone of the polynucleotide can comprise sugars and phosphate groups, as may typically be found in RNA or DNA, or modified or substituted sugar or phosphate groups. A polynucleotide may comprise modified nucleotides, such as methylated nucleotides and nucleotide analogs. These analogs are those molecules having some structural features in common with a naturally occurring nucleoside or nucleotide such that when incorporated into a nucleic acid or oligonucleotide sequence, they allow hybridization with a naturally occurring nucleic acid sequence. Typically, these analogs are derived from naturally occurring nucleosides and nucleotides by replacing and/or modifying the base, the ribose or the phosphodiester moiety. The changes can be tailor made to stabilize or destabilize hybrid formation or enhance the specificity of hybridization with a complementary nucleic acid sequence as desired.

[0034] The term “complementary” as used herein refers to a nucleotide or nucleotide sequence that hybridizes to a given nucleotide or nucleotide sequence. For instance, for RNA, the nucleotide A is complementary to the nucleotide U, and vice versa, and the nucleotide C is complementary to the nucleotide G, and vice versa. Complementary nucleotides include those that undergo Watson and Crick base pairing and those that base pair in alternative modes.

[0035] The term “isolated” as used herein means altered “by the hand of man” from its natural state, i.e., if it occurs in nature, it has been changed or removed from its original environment, or both. Thus, the term “isolated nucleic acid sequence” as used herein refers to a nucleic acid sequence which has been purified from the sequences which flank it in a naturally occurring state. It can also be used to refer to a synthesized nucleic acid sequence which does not exist in nature. In some examples, the term “isolated nucleic acid sequence” and “synthesized nucleic acid sequence” can be used interchangeably.

[0036] The term “target nucleic acid sequence” as used herein refers to the nucleic acid sequence of interest that is to be detected using the molecular sensor system of the present invention. The molecular sensor system includes the molecular sensor which is the isolated nucleic acid sequence of the first aspect. The target nucleic acid sequence can be a single-stranded nucleic acid sequence or double-stranded nucleic acid sequence. Preferably, it is a single-stranded nucleic acid sequence. The nucleic acid sequence can be a deoxyribonucleic acid (DNA) sequence or a ribonucleic acid (RNA) sequence. Preferably, it is an RNA sequence. Examples of RNA sequences include but are not limited to, microRNA (miRNA), short interfering RNA (siRNA), small RNA (sRNA), messenger RNA (mRNA), non-coding RNA (ncRNA), transfer RNA (tRNA), ribsomal RNA (rRNA), transfer-messenger RNA (tmRNA), clustered regularly interspaced short palindromic repeats RNA (CRIPSR RNA), antisense RNA, pre-mRNA and pre-miRNA. In one specific example, the RNA sequence is a miRNA sequence.

[0037] The term “microRNA” (abbreviated miRNA) as used herein refers to a small non-coding RNA molecule. It generally functions in RNA silencing and post-transcription regulation of gene expression. While the majority of miRNAs are located within the cell, some miRNAs, commonly known as circulating miRNAs or extracellular miRNAs, have also been found in extracellular environment, including various biological fluids and cell culture media. In some examples, the length of the miRNAs can be between 10 to 12, or between 12 to 14, or between 14 to 16, or between 16 to 18, or between 18 to 20, or between 20 to 22, or between 22 to 24, or between 24 to 26, or between 26 to 28, or between 28 to 30, or 11, 13, 15, 17, 19, 21, 23, 25, 27, or 29 nucleotides long.

[0038] The terms “domain” and “region” as used herein refer to different sections of the linear nucleic acid sequence of the isolated nucleic acid sequence of the first aspect. Domain refers to sections that either have direct interaction with the target nucleic acid sequence or the detection agent. Regions, on the other hand, are sections of the linear nucleic acid sequence that are not known to directly interact with either the target nucleic acid sequence or the detection agent before the target nucleic acid sequence is bound. However, regions can be capable of stabilising a detection agent upon the isolated nucleic acid of the first aspect binding to the target nucleic acid sequence.

[0039] The term “secondary structure” of a nucleic acid molecule refers to the base-pairing interactions within a single molecule or set of interactive molecules, and can be represented as a list of bases which are paired in a nucleic acid molecule. The secondary structures of biological DNAs and RNAs tend to be different: biological DNA mostly exists as fully base-paired double helices, while biological RNA is single stranded and often forms complicated base-pairing interactions due to its increased ability to form hydrogen bonds stemming from the extra hydroxyl group in the ribose sugar. Examples for secondary structures of nucleic acids include, but are not limited to, single-nucleotide bulges, three-nucleotide bulges, stems, stem loops, t-RNA type structures, cloverleaves, tetraloops, pseudoknots, symmetrical internal loops, asymmetrical internal loops, three stem junctions, four stem junctions, two-stem junctions or coaxial stacks or combinations thereof. Specific examples of secondary structures include stems, stem loops, t-RNA type structures, cloverleaves, tetraloops, pseudoknots or combinations thereof.

[0040] As used herein, the term “stem loop”, also known as a “hairpin loop”, refers to a secondary nucleic acid structure that forms when two regions of the same strand, usually complementary in nucleotide sequence when read in opposite directions, base-pair to form a double helix that ends with an unpaired loop.

[0041] The term “ternary complex” as used herein refers to a complex containing three different molecules that are bound together. These three different molecules can be the isolated nucleic acid sequence of the first aspect, the target nucleic acid sequence that binds to the isolated nucleic acid sequence of the first, and the detection agent.

[0042] In some examples, domains A and B form stem loops. The lengths of the stems of the stem loops of domains A and B are independent from each other, and can be the same or different. For example, each of the stems of the stem loops of domains A and B can be between 1 to 5, or between 5 to 10, or between 10 to 15, or between 15 to 20, or 3, 4, 5, 6, 7, 8, 9, 10 nucleotides long. In some specific examples, each of the stems of the stem loops of domains A and B is 5 or 6 or 7 nucleotides long. In some specific examples, the stem of the stem loop of domain B is 6 nucleotides long.

[0043] In some examples, when the length of the stem of the stem loop of domain B increases from 3 nucleotides long to 4 nucleotides long, or from 4 nucleotides long to 5 nucleotides long, or from 5 nucleotides long to 6 nucleotides long, the signal strength of the sensor upon binding the target nucleic acid sequence will increase. In some examples, the signal strength is increased by 0.5 fold, 1 fold, 1.5 folds, 2 folds, 2.5 folds or 3 folds, or between 0.2 fold to 5 folds.

[0044] In some examples, the nucleotides of domains C₁ and C₂ complementarily bind to the opposite ends of the target nucleic acid sequence respectively. For example, domain C₁ can complementarily bind to the 5′ end of the target nucleic acid sequence, while domain C₂ can complementarily bind to the 3′ end of the target nucleic acid sequence, and vice versa. The complementary binding can be either partially complementary or fully complementary. For example, domain C₁ can be between about 70 to about 80%, or between about 80% to about 90%, or between about 90% to about 100%, or between about 75% to about 85%, or between about 85% to about 95%, or between about 95% to about 100%, or between about 88% to about 98%, or about 90%, about 91%, about 92%, about 93%, about 94%, about 95%, about 96%, about 97%, about 98%, about 99% or about 100% complementary to the 5′ end of the target nucleic acid sequence; and domain C₂ can be between about 70 to about 80%, or between about 80% to about 90%, or between about 90% to about 100%, or between about 75% to about 85%, or between about 85% to about 95%, or between about 95% to about 100%, or between about 88% to about 98%, or about 90%, about 91%, about 92%, about 93%, about 94%, about 95%, about 96%, about 97%, about 98%, about 99% or about 100% complementary to the 3′ end of the same target nucleic acid sequence, and vice versa. The lengths of domains C₁ and C₂ are independent from each other, and can be the same or different. For example, each of domains C₁ and C₂ can be between 3 to 5, or between 5 to 10, or between 10 to 15, or between 15 to 20, or between 20 to 30, or between 30 to 40, or between 40 to 50, or 3, 4, 5, 6, 7, 8, 9, 10 nucleotides long. In some specific examples, domain C₁ is 6 nucleotides long. In some other examples, domain C₂ is 8 nucleotides long.

[0045] In some examples, domain A can form a stem-loop. In some other examples, domain C₂ and the 3′ end of the target nucleic acid sequence can complementarily bind to each other to form a stem. In some examples, (i) the stem-loop formed by domain A and (ii) the stem formed between domain C₂ and the 3′ end of the target nucleic acid sequence together form a stem-loop. In some examples, this stem-loop formed by (i) and (ii) above is called stem-loop P4. The nucleic acid sequence of stem-loop P4 is variable, depending on the sequence of the target nucleic acid, and consequently the sequence of domain C₂. In some examples, all the isolated nucleic acid sequences of the first aspect comprise stem-loop P4.

[0046] In some examples, the target nucleic acid sequence to be detected does not fully bind to the isolated nucleic acid of the first aspect. A middle region of nucleic acids may be present between the 5′ and the 3′ ends of the target nucleic acid sequence, and the middle region does not bind to either domain C₁ or C₂. In some examples, the middle region can be between 1 to 2, or between 2 to 4, or between 4 to 6, or between 6 to 8, or between 8 to 10, or between 10 to 12, or between 12 to 14, or between 14 to 16, or between 16 to 18, or between 18 to 20, or 3, 5, 7, 9, 11, 13, 15, 17 or 19 nucleotides in length. In one specific example, the middle region is 2 nucleotides in length. In one specific example, the middle region comprises one uracil nucleotide. In some examples, the middle region comprises one uracil nucleotide and one nucleotide selected from: uracil, adenine, guanine and cytosine. In one specific example, the middle region comprises two uracil nucleotides. In one specific example, the middle region consists of two uracil nucleotides. In some other examples, the middle region does not comprise any uracil nucleotides.

[0047] In some examples, regions R₂ and/or R₄ are capable of forming secondary or linear structures. R₂ or R₄ can be between 0 to 20, or between 1 to 5, or between 5 to 10, or between 10 to 15, or between 15 to 20, or between 4 to 7, or between 8 to 15, or between 15 to 20 nucleotides in length. In some examples, R₂ or R₄ is absent. In some examples, both R₂ and R₄ are absent. When R₂ is absent, domain A is directly linked to domain C₂. When R₄ is absent, domain B is directly linked to domain C₁. Preferably, the regions R₂ and R₄ do not interfere with interactions of the domains of the isolated nucleic acid sequence of the first aspect.

[0048] In some examples, region R₁ or R₅ is between 0 to 20, or between 1 to 5, or between 5 to 10, or between 10 to 15, or between 15 to 20, or between 4 to 7, or between 8 to 15, or between 15 to 20 nucleotides in length. Preferably, the regions R₁ and R₅ do not interfere with interactions of the domains of the isolated nucleic acid sequence of the first aspect.

[0049] In some examples, the region R₃ is between 0 to 100, or between 1 to 5, or between 5 to 10, or between 10 to 15, or between 15 to 20, or between 20 to 30, or between 30 to 40, or between 40 to 50, or between 50 to 60, or between 60 to 70, or between 70 to 80, or between 80 to 90, or between 90 to 100 nucleotides in length.

[0050] Preferably, the target nucleic acid sequence is competitively bound to the isolated nucleic acid sequence of the first aspect.

[0051] In some examples, region R₃ can further comprise defined domains and regions. In some examples, the isolated nucleic acid sequence of the first aspect can also have the following structure:

[chemical structure]

wherein X₁ to Xₙ are domains containing nucleic acids that interact with the detection agent in a ternary complex and wherein Xₙ denotes a variable number of domains, and wherein R₁ to R₅ are as previously defined and wherein R₃ₐ and R_{ab} to R₃ₙ are the regions between the domains C₂ and X₁, X₁ to Xₙ, and Xₙ and C₁ respectively, wherein R₃ₙ denotes a variable number of regions according to the number of Xₙ domains present.

[0052] In some examples, the total number of domains Xₙ can be 2, 3, 4, 5, 6, 7, 8, 9 or 10. The maximum number of domains Xₙ present in the isolated nucleic acid sequence is the total number of nucleotides within the domains Xₙ that interact with the detection agent in a ternary complex. In some examples, each of domains X₁ to Xₙ is between 1 to 5, or between 5 to 10, or between 10 to 15, or between 15 to 20, or between 4 to 7, or between 8 to 15, or between 10 to 18, or 6, 7, 9, 10, 11, 12, 13, 14, 15, 16, 17, 18, 19, 20, 21, 22, 23, 24, 25 nucleotides in length. The length of each of domains X₁to Xₙ is independent, and can be the same or different from each other.

[0053] Region R₃ is capable of stabilising a detection agent once the isolated nucleic acid sequence of the first aspect binds to the target nucleic acid sequence.

[0054] The term “detection agent” as used herein refers to a substance that is capable of producing a detectable signal once being activated. A detection agent can be a chemical compound or a macromolecule, and it can be activated upon sensing its target analyte. Examples of such detection agents include but are not limited to fluorophore, chromophore, photophore, pigment and chromatophore.

[0055] The term “fluorophore” as used herein refers to a fluorescent chemical compound that can re-emit light upon light excitation. Fluorophores typically contain several combined aromatic groups, or planar or cyclic molecules with several π bonds. Although sometimes being used alone, fluorophores are more generally covalently bonded to a macromolecule. Examples of fluorophore include but are not limited to 4-(3,4,5-trimethoxybenzylidene)-1,2-dimethyl-imidazol-5-one (“TMBI”); 4-(4-hydroxy-3,5-dimethoxybenzylidene)-1,2-dimethyl-imidazol-5-one (“DMHBI”); 4-(3,5-difluoro-4-hydroxybenzylidene)-1,2-dimethyl-imidazol-5-one (“DFHBI”); (E)-4-(3,5-difluoro-4-hydroxyb enzylidene)-1-methyl-5-oxo-4,5-dihydro-1H-imidazole-2-carbaldehyde O-methyl oxime (“DFHBI-methyloxime”); 4-(3,5-dichloro-4-hydroxybenzylidene)-1,2-dimethyl-imidazol-5-one; 4-(3,5-dibromo-4-hydroxybenzylidene)-1,2-dimethyl-imidazol-5-one; 4-(2-hydroxybenzylidene)-1,2-dimethyl-imidazol-5-one HBI″); 4-(2-methoxybenzylidene)-1,2-dimethyl-imidazol-5-one; 4-(3-fluoro-4-hydroxy-5-methoxybenzylidene)-1,2-dimethyl-imidazol-5-one; 4-(4-(dimethylamino)benzylidene)-1,2-dimethyl-imidazol-5-one (“DMABI”); 4-(4-(t-butylthio)benzylidene)-1,2-dimethyl-imidazol-5-one; 4-(4-(methylthio)benzylidene)-1,2-dimethyl-imidazol-5-one; 4-(4-cyanobenzylidene)-1,2-dimethyl-imidazol-5-one; 4-(3 ,5-difluoro-4-acetate)benzylidene-1,2-dimethyl-imidazol-5-one; 4-(4-hydroxy-3 -nitrobenzylidene)-1,2-dimethyl-imidazol-5-one; 4-(4-hydroxy-3-methoxy-5-nitrobenzylidene)-1,2-dimethyl-imidazol-5-one; 4-(4-methoxy-3-nitrobenzylidene)-1,2-dimethyl-imidazol-5-one; 4-(4-bromobenzylidene)-1,2-dimethyl-imidazol-5-one; 4-(4-chlorobenzylidene)-1,2-dimethyl-imidazol-5-one; 4-(4-hydroxybenzylidene)-1,2-dimethyl-imidazol-5-one (“p-HBI”); 4-((indol-7-yl)methylene)-1,2-dimethyl-imidazole-5-one; 4-((indol-3-yl)methylene)-1,2-dimethyl-imidazole-5-one; 4-((indol-3-yl)methylene)-1-methyl-2-phenyl-imidazole-5-one; 4-(4-hydroxy-3,5-dimethoxybenzylidene)-1-methyl-2-phenyl-imidazole-5-one; 4-(4-(dimethylamino)benzylidene)-1 -methyl -2 -phenyl-imidazole-5 -one; 4-(4-hydroxybenzylidene)-2-acetyl-1 -methyl -imidazole-5 -one; 4-(4-hydroxybenzylidene)-1-methyl-2-prop-1-enyl-imidazole-5-one; 3-(4-(4-hydroxybenzylidene)-4,5-dihydro-1-methyl-5-oxo-imidazol-2-yl)acrylamide; 3 -(4-(4-hydroxybenzylidene)-4,5-dihydro-1-methyl-5 -oxo-imidazol-2-yl)acrylic acid; methyl 3-(4-(4-hydroxybenzylidene)-4,5-dihydro-1-methyl-5-oxo-imidazol-2-yl)acrylate; 4-(3,5-difluoro-4-hydroxybenzylidene)-1-methyl-2-((E)-2-nitro vinyl)-1H-imidazol-5(4H)-one (“DFAN”); 4-(3-fluoro-4-hydroxy-5-methoxybenzylidene)-1 -methyl-2-((E)-2-nitro vinyl)-1H-imidazol-5(4H)-one; 4-(3-fluoro-4-hydroxy-5-methoxybenzylidene)-1-methyl-5-oxo-4,5-dihydroimidazole-2-carbaldehyde O-methyl oxime; 4-(3 -fluoro-4-hydroxy-5-methoxybenzylidene)-1-methyl -5-oxo-4,5-dihydro imidazole-2-carbaldehyde oxime (“MFHO”); 4-(3,5-difluoro-4-hydroxybenzylidene)-1-methyl-5-oxo-4,5-dihydro-1H-imidazole-2-carbaldehyde oxime; 4-(3,5-difluoro-4-hydroxybenzylidene)-1-methyl-5-oxo-4,5-dihydro-1H-imidazole-2-carboxylic acid; 4-(3 -fluoro-4-hydroxy-5-methoxybenzylidene)-1-methyl-5-oxo-4,5-dihydro imidazole-2-carboxylic acid; 4-(3,5-difluoro-4-hydroxybenzylidene)-1-methyl-5-oxo-4,5-dihydro-1H-imidazole-2-carboxamide; 4-(3,5-difluoro-4-hydroxybenzylidene)-N,1-dimethyl-5-oxo-4,5-dihydroimidazole-2-carboxamide; 4-(3-fluoro-4-hydroxy-5-methoxyb enzylidene)-N,1-dimethyl-5-oxo-4,5-dihydro imidazole-2-carboxamide; methyl 3-((Z)-4-(3,5-difluoro-4-hydroxybenzylidene)-1-methyl-5-oxo-4,5-dihydro-1H-imidazol-2-yl)acrylate (“DFAME”); methyl 3 -(4-(3-fluoro-4-hydroxy-5 -methoxybenzylidene)-1-methyl-5 -oxo-4,5 -dihydro-1H-imidazol-2-yl)acrylate, 4-(3 -fluoro-4-hydroxy-5-methoxybenzylidene)-1,2-dimethyl-1H-imidazol-5(4H)-one (“MFHBI”), and combinations thereof. In one specific example, the fluorophore is DFHBI.

[0056] The isolated nucleic acid sequence of the first aspect can be a ribonucleic acid (RNA) sequence, a deoxyribonucleic acid (DNA) sequence, a sequence comprising non-natural nucleic acids, or a sequence comprising nucleic acid analogues. In one specific example, the isolated nucleic acid sequence of the first aspect is an RNA sequence.

[0057] In some examples, the isolated nucleic acid sequence of the first aspect comprises the sequence as defined by SEQ ID NO.: 1 or SEQ ID NO.: 2. In some examples, the sequence as defined by SEQ ID NO.:2 represents the core template of the isolated nucleic acid sequence of the first aspect. In one example, the core template refers to the sequence of the nucleotides in region R₃, as illustrated in FIG. 12.

[0058] In some examples, the isolated nucleic acid sequence of the first aspect comprises any one of the sensor sequences as listed in Table 1, i.e. nucleic acid sequences of SEQ ID NOs.: 2618 to 2632, 2634, 2636, 2638, 2640, 2641, 2643, 2645, 2647, 2649, 2651, 2652 and 2654.

TABLE 1
Examples of RNA sensors.

| SEQ ID | Name | | Name of | Sequence |
|---|---|---|---|---|
| NO. of | of | | Target | of Target RNA |
| sensor | Sensor | Sequence of Sensor (5′ to 3′) | RNA | (5′ to 3′) |
| 2618 | PNDN- bantam-3p | [chemical structure] | bantam-3p | UGAGAUCAUUUU GAAAGCUGAUU (SEQ ID NO.: 2617) |
| 2619 | PNDN- dme-miR-263a | [chemical structure] | mir-263a | AAUGGCACUGGA AGAAUUCACGGG (SEQ ID NO.: 2609) |
| 2620 | PNDN-dme-miR- 263a_6nt (PNDN-dme-miR- 263a with | [chemical structure] | | |
| | 6nt in SL3) | | | |
| 2621 | PNDN 263a_9nt (PNDN 263a with | [chemical structure] | | |
| | 9nt in SL3) | | | |
| 2622 | PNDN 263a_12nt (PNDN 263a with 12nt in SL3) | [chemical structure] | | |
| 2623 | PNDN- dme-bantam5p | [chemical structure] | bantam5p | CCGGUUUUCGAU UUGGUUUGACU (SEQ ID NO.: 2599) |
| 2624 | PNDN- bantam-5p_6nt (PNDN- bantam-5p | [chemical structure] | | |
| | with 6nt in | | | |
| | SL3) | | | |
| 2625 | PNDN bantam5p_9nt (PNDN bantam5p with 9nt in SL3) | [chemical structure] | | |
| 2626 | PNDN bantam5p_12nt (PNDN bantam5p with 12nt SL3) | [chemical structure] | | |
| 2627 | PNDN bantam5p_10nt (PNDN bantam5p with 10nt | [chemical structure] | | |
| | in SL4) | | | |
| 2628 | PNDN bantam5p_13nt (PNDN bantam5p 13nt in SL4) | [chemical structure] | | |
| 2629 | PNDN- dme-miR-1000 | [chemical structure] | mir-1000 | AUAUUGUCCUGU CACAGCAGU (SEQ ID NO.: 2611) |
| 2630 | PNDN-dme- miR-1000_6nt (PNDN- dme-miR-1000 | [chemical structure] | | |
| | with 6nt | | | |
| | in SL3) | | | |
| 2631 | PNDN 1000_9nt (PNDN 1000 with 9nt in SL3) | [chemical structure] | | |
| 2632 | PNDN 1000_12nt (PNDN 1000 with 12nt in SL3) | [chemical structure] | | |
| 2634 | PNDN- hsa-miR21-5p | [chemical structure] | hsa_miR-21-5p | GUAGCUUAUCAG ACUGAUGUUGAC (SEQ ID NO.: 2633) |
| 2636 | PNDN- hsa_miR-375 | [chemical structure] | hsa_miR-375 | UUUGUUCGUUCG GCUCGCGUG (SEQ ID NO.: 2635) |
| 2638 | PNDN- hsa-miR-223-3p | [chemical structure] | has_miR-223-3p | GUCAGUUUGUCA AAUACCCCAA (SEQ ID NO.: 2637) |
| 2640 | PNDN- hsa_miR-223-5p | [chemical structure] | hsa_miR-223-5p | CGUGUAUUUGAC AAGCUGAGUUG (SEQ ID NO.: 2639) |
| 2641 | PNDN- hsa_miR-122 | [chemical structure] | hsa_miR-122 | UGGAGUGUGACA AUGGUGUUUG (SEQ ID NO.: 74) |
| 2643 | PNDN- hsa_let7f | [chemical structure] | hsa_let7f | UGAGGUAGUAGA UUGUAUAGUUGU (SEQ ID NO.: 2642) |
| 2645 | PNDN- dme-miR-124 | [chemical structure] | dme-miR-124 | UAAGGCACGCGG UGAAUGCCAA (SEQ ID NO.: 2644) |
| 2647 | PNDN- dme-miR-14 | [chemical structure] | dme-miR-14 | UCAGUCUUUUUC UCUCUCCUAU (SEQ ID NO.: 2646) |
| 2649 | PNDN- dme-miR-184 | [chemical structure] | dme-miR-184 | UGGACGGAGAAC UGAUAAGGGC (SEQ ID NO.: 2648) |
| 2651 | PNDN- dme-miR-252 | [chemical structure] | dme-miR-252 | CUAAGUACUAGU GCCGCAGGAG (SEQ ID NO.: 2650) |
| 2652 | PNDN- _snoR 442_5′ | [chemical structure] | snoR442 5′ region | CGCAAGCCUGUU GGGUGUGAUUC (SEQ ID NO.: 2615) |
| 2654 | PNDN _snoR 442_3′ | [chemical structure] | snoR442 3′ region | UGCUUGUCAUAG UUACUCUGAUC (SEQ ID NO.: 2653) |

[chemical structure]

[0059] The isolated nucleic acid sequence of the first aspect can be used for the detection of a target nucleic acid sequence in an animal. Thus, in a second aspect, the present invention provides a method of detecting a target nucleic acid sequence in an animal, wherein the method comprises using the isolated nucleic acid sequence of the first aspect. In one example, the method comprises the steps of (i) contacting the isolated nucleic acid sequence of the first aspect with a detection agent and a sample obtained from the animal; and (ii) measuring the signal level from the detection agent.

[0060] The animal can be a mammalian animal or a non-mammalian animal. Examples of such animals include but are not limited to drosophila, human, mouse, and zebra fish.

[0061] The term “sample” as used herein refers to a sample suspected of containing the target nucleic acid sequence. It may comprise a bodily fluid. The term “sample” used herein refers to a biological sample, or a sample that comprises at least some biological materials such as nucleic acids. The biological samples of this disclosure may be any sample suspected to contain the target nucleic acid sequence, including liquid samples, such as whole blood, blood serum, blood plasma, cerebrospinal fluid, central spinal fluid, lymph fluid, cystic fluid, sputum, stool, pleural effusion, mucus, pleural fluid, ascitic fluid, amniotic fluid, peritoneal fluid, saliva, bronchial washes, urine and other bodily fluid, or extracts thereof. It may also comprise an extract from a cell, chromosome, or organelle; genomic DNA, RNA, or cDNA.

[0062] In one example, the detecting of the target nucleic acid is in real-time.

[0063] The term “real-time” as used herein refers to the detection of the target nucleic acid sequence as the sequence is being produced, or the detection of the quantity of the target nucleic acid sequence as the quantity is changing with time. In some examples, the quantity of the target nucleic acid is increasing as it is being monitored, while in some other examples, the quantity of the target nucleic acid is decreasing as it is being monitored.

[0064] The target nucleic acid sequence to be detected can be a disease-specific nucleic acid sequence.

[0065] A large number of different target nucleic acid sequences can be detected using the isolated nucleic acid sequence of the first aspect, as the specific sequence of domains C₁ and C₂ can be designed based on the sequence of the target nucleic acid. Examples of the target nucleic acid sequences that can be detected include but not limited to the sequences of SEQ ID NO.: 10 to 2597.

[0066] miRNAs are an emerging class of biomarkers, which are misregulated in a number of diseases. miRNA expression signatures (for example, up-regulations and down-regulations as compared to normal subject) have shown promise for use in diagnosis, staging of diseases, prognosis and as predictors of clinical response. For example, miRNA signatures correlate with neoplastic events, allowing early detection of cancer; circulating miRNAs have been detected patients with diffuse large B cell lymphoma. Therefore, method and systems for the detection and quantification of miRNAs have broad applicability.

[0067] Thus, in a third aspect, the present invention provides a method of determining if a subject has a disease or is at increased risk of developing a disease, wherein said method comprises providing a sample comprising nucleic acids from a subject and detecting one or more target nucleic acid sequences that bind to the isolated nucleic acid of the first aspect. In one example, the method comprises the steps of (i) contacting the isolated nucleic acid sequence of the first aspect with a detection agent and the sample from the subject; and (ii) measuring the signal level from the detection agent.

[0068] In a fourth aspect, the present invention provides a method of treating a patient which has a disease or is at increased risk of developing a disease, wherein said method comprises (i) providing a sample comprising nucleic acids from a patient and detecting one or more target nucleic acid sequences that bind to the isolated nucleic acid sequence of the first aspect, and (ii) administering to the patient one or more therapeutic agents for the treatment of the disease associated with the one or more target nucleic acid sequences detected in (i). In one example, steps (i) comprises (a) contacting the isolated nucleic acid sequence of the first aspect with a detection agent and the sample from the patient; and (ii) measuring the signal level from the detection agent.

[0069] Examples of such diseases include but are not limited to cardiac ischemia, diabetes, sepsis, rheumatoid arthritis, hepatic ischemia, hepatitis C, cardiac disease, Alzheimer's disease, Parkinson's disease, spinal motor neuron disease and cancer. Examples of cancer includes but are not limited to colorectal cancer, glioblastomas, neuroblastomas, acute myelogenous leukaemia, chronic lymphocytic leukaemia, lung cancer, non-small cell lung cancer, small cell lung cancer, B-cell lymphoma, T-cell lymphoma, multiple lymphoma, ovarian cancer, breast cancer, hepatocellular cancer, pancreatic cancer, prostate cancer and squamous cell carcinomas.

[0070] Currently available methods for determining if a patient has a disease or is at increased risk of developing a disease generally require complex biochemical processing and analysis of the sample. Such methods are thus time consuming, expensive, and require specialized skill set for analysis. In contrast, the methods of the third aspect could provide a fast and simple assay system suitable for use in the clinical laboratory without the need for advanced skills of the lab technicians.

[0071] In the fifth aspect, the present invention provides a kit comprising the isolated nucleic acid of the first aspect and a detection agent described herein.

[0072] The invention illustratively described herein may suitably be practiced in the absence of any element or elements, limitation or limitations, not specifically disclosed herein. Thus, for example, the terms “comprising”, “including”, “containing”, etc. shall be read expansively and without limitation. Additionally, the terms and expressions employed herein have been used as terms of description and not of limitation, and there is no intention in the use of such terms and expressions of excluding any equivalents of the features shown and described or portions thereof, but it is recognized that various modifications are possible within the scope of the invention claimed. Thus, it should be understood that although the present invention has been specifically disclosed by preferred embodiments and optional features, modification and variation of the inventions embodied therein herein disclosed may be resorted to by those skilled in the art, and that such modifications and variations are considered to be within the scope of this invention.

[0073] The invention has been described broadly and generically herein. Each of the narrower species and subgeneric groupings falling within the generic disclosure also form part of the invention. This includes the generic description of the invention with a proviso or negative limitation removing any subject matter from the genus, regardless of whether or not the excised material is specifically recited herein.

[0074] Other embodiments are within the following claims and non-limiting examples. In addition, where features or aspects of the invention are described in terms of Markush groups, those skilled in the art will recognize that the invention is also thereby described in terms of any individual member or subgroup of members of the Markush group.

### EXPERIMENTAL SECTION

### Example 1

### Design and Preparation of Sensors

[0075] A fluorescent RNA-fluorophore complex, Spinach, has previously been used as a tag for mRNAs, and has also been adapted for use as sensors for small molecule metabolites screenings. The RNA scaffold of Spinach forms a binding site for a fluorophore, 3,5-difluoro-4-hydroxybenzylidene imidazolinone (DFHBI), which becomes fluorescent upon binding to the RNA scaffold.

[0076] Spinach2 is an aptamer that differs from Spinach by a few nucleotides, but is of a similar structure as the Spinach aptamer. Spinach2 is a single linear RNA molecule that was computationally predicted (mFold) to fold into a structure comprising four stem-loop regions (FIG. 6A). Spinach2 is brighter with better fluorescence properties as compared to Spinach. The crystal structure of Spinach2 when bound to the fluorophore DFHBI was then solved and shown to instead consist of a three-tetrad quadruplex flanked by two helices. The solved structure is diagrammed in simplified 2D form in FIG. 6B, and in detailed form in FIG. 6C. Although the strategy and experiments for the sensor design began with the mFold structure, prior to the publications of the crystal structure, for simplicity the experiments are illustrated in terms of the solved structure.

[0077] The inventors reasoned that a sensor with fluorescence properties similar to Spinach2 could be assembled from two different RNA molecules if the structural elements required for stable complex formation with DHFBI could be reconstituted by base pairing between these two RNA molecules. To make a bimolecular microRNA sensor, part of the structure of Spinach2 would have to be removed and replaced by sequences complementary to the miRNA, so that binding of the miRNA is required for stable complex formation. Sequences complementary to the miRNA in this duplex region could form the basis of a sensor. This would require two modifications: (i) to circularly permutate Spinach, changing the positions of the 5′ and 3′ ends of the RNA aptamer to reside within Stem-loop P3 (SL P3); and (ii) to introduce a second sequence-variable stem loop adjacent to SL P3. As the predicted mFold structure contained two stem loops adjacent to SL P3, a possible strategy was to alter one of them. Another strategy was to introduce a new stem-loop. The inventors systematically tested the modifications required for this approach to be feasible.

[0078] To produce a circularly permuted (CP) version of Spinach RNA, with the 5′ end in SL P3, part of the T7 transcriptional start site needs to be incorporated into SL P3 without compromising fluorescence. Extending SL P3 by adding the partial T7 transcriptional start sequence GGGA did not reduce fluorescence (FIG. 7A, SL P3 T7). Using the T7 transcription start site in SL P3, the inventors synthesized a version of Spinach RNA in which the original 3′ and 5′ ends in stem P1 were connected with a short additional loop to produce a CP Spinach molecule. CP Spinach2 retained about 50% of the fluorescence of Spinach2 (FIG. 7A, CP Spinach2). An RNA in which the sequence of Spinach was randomly rearranged did not fluoresce (FIG. 7A, Scrambled Spinach2).

[0079] The CP Spinach design allowed for the possibility of a bimolecular sensor. To function, the sensor would require a second, adjacent stem loop whose sequence could also be varied. The inventors tested whether insertion of a new stem loop adjacent to Stem-loop

[0080] P3 (SL P3) would be compatible with fluorescence. A second copy of the SL P3 sequence was inserted on the 5′ side of the original SL P3 (FIG. 6A-C, grey arrow heads) or on the 3′ side of the original SL P3 (FIG. 6A-C, black arrow heads). In both positions, this modification resulted in a functional fluorescent molecule (Dup SL P3, FIG. 7B). Next, the inventors tested adding a stem loop with a different sequence. This was well tolerated when inserted 3′ to SL P3, but not when inserted at 5′ to SL P3 (new SL P3 5′, FIG. 7B).The inventors named the predicted three-stem loop fluorescent RNA-complex, Pandan (FIG. 8).

[0081] In short, the present inventors have redesigned Spinach so that folding to create a DFHBI-binding scaffold depends on interaction between a miRNA and a sequence complementary RNA backbone. This sensor family was named by the inventors as Pandan, after a plant used to provide an aromatic green coloring in Southeast Asian cooking. Binding of the target miRNA to the Pandan sensor reconstitutes an RNA structure capable of binding the DFHBI fluorophore in a manner similar to the Spinach2 aptamer. This novel aptamer serves as an RNA sensor that directly detects microRNAs by fluorophore binding.

[0082] Pandan sensors can be adapted for the detection of any miRNA. The sensors were designed by encoding complementary sequence for the 5′ region of the target miRNA within Stem-loop P3 (SL P3), and the 3′ region of the target miRNA within Stem-loop P4 (SL P4) of Pandan, with two unpaired nucleotides in the microRNA between the two portions. In some examples, the sensors were designed so that miRNA binding would result in a Uracil (U) in the second unpaired base downstream of SL P3. The online mFold server was then used to determine whether the sensor and miRNA pair were predicted to properly fold into the Pandan structure using a sequence where the sensor and miRNA were encoded as a single molecule.

[0083] The Pandan aptamer contains two adjacent stem loops (P3 and P4) that are essential for complex stability, but whose sequence can be varied. This structure allows the RNA portion of the RNA-fluorophore complex to be reconstituted by the binding of two separate RNA molecules, one of which can be any short RNA sequence.

[0084] Single stranded DNA templates for designed sensors (synthesized by Sigma Aldrich or IDT) were amplified using PCR to create double stranded DNA templates using primers that included a 5′ T7 promoter sequence (5′-GTATAATACGACTCACTATAGGGA-3′, SEQ ID NO.: 9). PCR products were purified using PCR purification columns (Qiagen) and used as templates for in vitro T7 transcription Epicentre) following the manufacturers' protocols. RNA sensors were extracted with ammonium acetate (5M) and phenol-chloroform, and precipitated with isopropanol using standard procedures. RNA pellets were then suspended in nuclease-free water, their concentration measured on a Nanodrop instrument. Samples were stored at −80° C.

[0085] A specific RNA sensor is designed for each miRNA (or small RNA) by incorporating complementary sequence for the miRNA into the sensor backbone (FIG. 9B).

[0086] The sequence of the sensor backbone (where (X)ₘ and (X)ₙ represent sequence complementary to the target RNA) is:

(SEQ ID NO.: 1)
5′-
GGGACACCUGAGUGUCCC(X)ₘUUGUUGAGUAGAGUGUGAGCUCCGUA
ACUAGUUACAUCACGGGAGAUGUAACUGAAUGAAAUGGUGAAGGACGG
GUCC(X)ₙGGCUGCUUCGGCAGCC - 3′.

[0087] An example is given here for Drosophila miR-1 (In bold is the unpaired portion of the microRNA with the second unpaired base being a U):

Sequence of dme-miR-1
(SEQ ID NO.: 4)

[chemical structure]

Reverse complement of 3′ paired seq
(SEQ ID NO.: 5)

[chemical structure]

Reverse complement of 5′ paired seq
(SEQ ID NO.: 6)

[chemical structure]

Foward primer:
(SEQ ID NO.: 7)
GTATAATACGACTCACTATAGGGACACCTGAGTGTCC
CCTCCATACTTCTTTTTGTTGAGTAGAGTGTGAGCTC
Reverse primer:
(SEQ ID NO.: 8)
GGCTGCCGAAGCAGCCTGGAATTGGACCCGTCCT
TCACCATTTCATTCAGT

[0088] Core template (can be used for all sensors):

(SEQ ID NO.: 2)
UUGUUGAGUAGAGUGUGAGCUCCGUAACUAGUUACAUCACGGGAGAUG
UAACUGAAUGAAAUGGUGAAGGACGGGUCCA.

[0089] Resulting sequence-specific sensor (sensor PNDN-dme-miR-1):

(SEQ ID NO.: 3)
GGGACACCUGAGUGUCCCCUCCAUACUUCUUUUUGUUGAGUAGAGUGU
GAGCUCCGUAACUAGUUACAUCACGGGAGAUGUAACUGAAUGAAAUGG
UGAAGGACGGGUCCAAUUCCAGGCUGCUUCGGCAGCC.

[0090] The predicted secondary structure of the designed RNA sensor is then checked using Mfold to ensure correct folding.

[0091] In vitro transcription of sensor from DNA template is carried out using

[0092] Ampliscribe T7-Flash Transcription Kit (Epicenter) according to the manufacturer's instructions. The RNA is then purified by phenol/chloroform extraction and isopropanol precipitation.

### Example 2

### miRNA Detection by Sensor Fluorescence

[0093] The RNA sensor (1 μM), target miRNA (IDTDNA; variable concentrations) and DFHBI (10 μM; Lucerna Technologies) is incubated in solution with continuous shaking at 37° C. in buffer (40 mM HEPES pH 7.4, 125 mM KCl and 1 mM MgCl₂) according to Paige et. al 2011 (Science 2011, (333) 642). Fluorescence is measured using a microplate reader (excitation wavelength 460 nm; emission wavelength 500 nm; slit widths 10 nm). Fluorescence measurement is then normalized to the maximum intensity of the fluorophore DFHBI alone.

### Example 3

### Pandan Sensors are Sensitive and Specific in Reporting Their MicroRNA of Interest

[0094] Here, we show an example with Pandan-bantam-5p.

[0095] FIG. 2—Fluorescence fold change of Pandan-bantam-5p and DFHBI upon addition of 1 uM, 0.1 uM and 0.01 uM of bantam-5p microRNA, compared to DFHBI-only control.

[0096] FIG. 10B—The response of Pandan-bantam-5p to bantam-5p microRNA is linear.

[0097] FIG. 11A—Pandan-bantam-5p is specific for bantam-5p microRNA compared to miR-263a.

### Example 4

### Pandan Sensors Recognize MicroRNAs In Vitro

[0098] The sequences of both stem-loops P3 and the new additional stem-loop P4 can be varied. This allows the inventors to encode sequences complementary to target miRNAs into the Pandan sensor backbone (illustrated in FIG. 9B). Pandan sensors specific to Drosophila miRNAs dme-bantam-3p, dme-miR-263a and dme-miR-1000, as well as for several human miRNAs were designed.

[0099] RNA was extracted from 15-30 Canton S white (CS10) male flies using TRIzol reagent (Invitrogen) following the manufacturer's protocol. To detect target miRNA in this complex mixture of extracted RNA, synthetic target miRNA (1, 0.1 or 0.01 μM) (IDT), Pandan sensor (1 μM) and DFHBI or DFHBI-1T (10 μM) were added either to a solution of extracted RNA in a buffer containing 40 mM HEPES pH 7.4, 125 mM KCl and 1 mM MgCl₂ or buffer control only without extracted RNA. Reactions were incubated at 37° C. for 1 h and fluorescence was recorded using a Tecan Safire2 fluorescence microplate reader with the following measurement parameters: excitation wavelength=460 nm; emission wavelength=501 nm; slit widths=10 nm. Experiments were carried out in triplicate for each data point.

[0100] In most cases, the sensor showed little or no fluorescence in the absence of the target miRNA. The fluorescence intensity of bound DFHBI increased between about 4- to 100-fold upon addition of target miRNA at 1 μM, compared to sensor or DFHBI alone (FIG. 11A). Fluorescence intensity increased with miRNA concentration (FIG. 11B), and the relationship was linear for the sensors that exhibited the brightest fluorescence: PNDN-bantam, PNDN-hsa-miR-21-5p, PNDN-hsa-let7f and PNDN-hsamiR-375 (FIG. 11B). The Pandan sensor PNDN-bantam-5p showed about 75% of the fluorescence intensity of Spinach2, on an equimolar basis, in the presence of its target miRNA (FIG. 11C).

[0101] FIG. 3 presents tests of additional modifications to the basic sensor design. Extension of the self-pairing region of SL P3 from three to six residues improved low-sensitivity sensors: PNDN-miR-263a increased from about 7- to 27-fold and PNDN-miR-1000 from about 4- to about 8-fold, while having less impact on those that were already sensitive (FIG. 3A to C). Further extension of SL P3 did not further improve sensor signal (FIG. 3D). Extension of stem loop P4 did not improve sensor signal (FIG. 3E). Five additional Drosophila miRNA sensors with the extended P3 design showed fluorescence increases from about 3- to about 96-fold upon miRNA addition (FIG. 3F). The median increase in fluorescence was 49-fold for the 14 Pandan miRNA sensors tested (Table 2).

[0102] In some examples, the sensors were designed so that miRNA binding would result in a uracil (U) in the second nucleotide downstream of SL P3 (FIGS. 8 and 9B). The sensors tested function well when complementary sequences for at least 6 nucleotides on both ends of the miRNA are encoded in the sensor (e.g. dme-miR-1, Table 2). About 89% of all human miRNAs have a Uracil located at the 3′ unpaired base, such that this Uracil residue is flanked by at least 6 nucleotides on both sides.

### Example 5

### Sequence Specificity

[0103] The inventors next investigated the sequence specificity of Pandan sensors. Addition of miR-263a to the bantam-5p-Pandan sensor in the presence of DFHBI did not increase its fluorescence (FIG. 11A). Nor did miR-263a reduce the sensitivity of this sensor to bantam-5p miRNA when the two miRNAs were added in equal concentrations. Similar results were obtained when probing the miR-1000 Pandan sensor with bantam-5p miRNA (FIG. 11A). Thus, Pandan sensors distinguish between miRNAs with dissimilar sequences.

[0104] Next, sequence changes were introduced into the test miRNAs to assess the ability of the sensors to differentiate between more closely related sequences. Changing three residues in the 5′ arm of the miRNA strongly reduced sensor fluorescence for the three examples tested (FIG. 11B). Single nucleotide mismatches in the miRNA seed reduced bantam-5p sensor activity by about 20-50%, with the magnitude of the difference being somewhat dependent on the location of the mismatch (FIG. 11C).

[0105] For Pandan sensors to be useful for detecting miRNAs in biological samples, the sensor must be able to identify its target RNA in a complex mixture. To test this, total RNA from adult Drosophila were prepared and assayed the ability of the bantam-3p Pandan sensor to detect bantam-3p miRNA spiked into the RNA mixture at a range of concentrations. The presence of up to 1000-fold excess of competing RNA did not decrease the ability of bantam-3p sensor to detect bantam-3p (P>0.05; FIG. 11D).

TABLE 2
Raw fluorescence readings in arbitrary units (a.u.) for each of the
tested sensors in the absence and presence of 1 μM target miRNA

| | | Raw fluorescence (a.u) | | |
|---|---|---|---|---|
| | # self-paired | | Sensor + | |
| | bases at 3′ | Sensor + | DFHBI + | |
| microRNA | end of SL P3 | DFHBI alone | miRNA | Fold change |
| dme-bantam-5p | 6 | 395 | 46 464 | 118 |
| dme-bantam-5p | 3 | 434 | 46 278 | 107 |
| dme-miR-184 | 6 | 398 | 38 426 | 97 |
| dme-bantam-3p | 3 | 457 | 43 279 | 95 |
| hsa-miR21-5p | 3 | 425 | 29 018 | 68 |
| hsa-let7f | 3 | 553 | 36 679 | 66 |
| hsa-miR223-5p | 3 | 416 | 24 869 | 60 |
| hsa-miR375 | 3 | 443 | 25 957 | 59 |
| hsa-miR122 | 3 | 424 | 20 706 | 49 |
| dme-miR-1 | 6 | 406 | 19 720 | 49 |
| dme-miR-252 | 6 | 991 | 46 368 | 47 |
| dme-miR-263a | 6 | 416 | 11 172 | 27 |
| hsa-miR223-3p | 3 | 1518 | 20 756 | 14 |
| dme-miR-1000 | 6 | 3343 | 26 788 | 8 |
| dme-miR-263a | 3 | 437 | 2903 | 7 |
| dme-miR-1000 | 3 | 5708 | 24 981 | 4 |
| dme-miR-124 | 6 | 10 522 | 41 931 | 4 |
| dme-miR-14 | 6 | 4708 | 14 175 | 3 |

### Example 6

### Pandan Sensors Detect Longer RNAs

[0106] The Pandan sensors described above were designed to allow pairing to the entire 19-23 nucleotides of their respective target miRNAs. To explore whether sensors of this design could be used to detect longer RNA molecules, sensors were prepared for the 46-nt SnoR442 RNA. Pandan sensors complementary to the 5′ or 3′ 23-nt halves of SnoR442 were designed (FIG. 5). Both sensors were able to detect SnoR422. The extended unpaired sequence of the target does not appear to compromise sensor binding at either the 5′ or 3′ end. Combining the two sensors had an additive effect on raw fluorescence values, and increased fold fluorescence to a moderate degree (FIG. 5).

1. An isolated nucleic acid molecule for detecting the presence of a target nucleic acid sequence, wherein the isolated nucleic acid sequence is capable of forming bimolecular interactions with a target nucleic acid sequence, wherein the isolated nucleic acid sequence forms a ternary complex stabilizing a detection agent when binding the target nucleic acid sequence and wherein the isolated nucleic acid sequence comprises the following structure: [chemical structure]
wherein A and B are domains forming stabilizing secondary structures, wherein C1 and C2 are domains that bind to the target nucleic acid sequence, wherein R2 and R4 are regions of nucleic acids that do not bind with the target nucleic acid sequence and wherein R3 is a region of nucleic acids capable of stabilizing a detection agent upon the isolated nucleic acid binding to the target nucleic acid structure.

2. The isolated nucleic acid molecule of claim 1, wherein the structure further comprises regions R₁ and R₅, wherein R₁ is upstream from domain A and R₅ is downstream from domain B and wherein R₁ and R₅ are regions of nucleic acids that do not bind with the target nucleic acid sequence and are capable of forming secondary structures.

3. The isolated nucleic acid molecule of claim 1, wherein R₂ and R₄ are capable of forming secondary or linear structures.

4. The isolated nucleic acid molecule of claim 1, wherein the stabilizing secondary structures and the secondary structures are selected from a group consisting of stems, stem loops, t-RNA type structures, cloverleaves, tetraloops, pseudoknots or combinations thereof.

5. The isolated nucleic acid molecule of claim 1, wherein domains A and B form stem loops.

6. The isolated nucleic acid molecule of claim 5, wherein the stems of the stem loops of domains A and B are independently from 6 and/or 7 nucleotides long.

7. The isolated nucleic acid molecule of claim 1, wherein the nucleic acids of domains C₁ and C₂ complementarily bind to the 5′ and 3′ ends of the target nucleic acid sequence.

8. The isolated nucleic acid molecule of claim 1, wherein domains C₁ and C₂ are of different lengths to each other; optionally wherein domain C₁ is 6 nucleotides in length or wherein domain C₂ is 8 nucleotides in length.

9. (canceled)

10. (canceled)

11. The isolated nucleic acid molecule of claim 1, wherein a middle region of nucleotides is present between the 5′ and the 3′ ends of the target nucleic acid sequence, wherein the middle region does not bind to either domain C₁ or C₂; optionally wherein the middle region is 2 nucleic acids in length; optionally wherein the middle region comprises two uracil nucleotides.

12. (canceled)

13. (canceled)

14. The isolated nucleic acid molecule of claim 1, wherein the target nucleic acid sequence is a single-stranded nucleic acid sequence.

15. The isolated nucleic acid molecule of claim 1, wherein the structure of the isolated nucleic acid sequence is [chemical structure]
wherein X₁ to Xₙ are domains containing nucleic acids that interact with the detection agent in a ternary complex and wherein Xₙ denotes a variable number of domains, and wherein R₁ to R₅ are as previously defined and wherein R₃ₐ and R_{3b} to R₃ₙ are the regions between the domains C₂ and X₁, X₁ to Xₙ and Xₙ and C₁ respectively, wherein R₃ₙ denotes a variable number of regions according to the number of Xₙ domains present.

16. (canceled)

17. The isolated nucleic acid molecule of claim 1, wherein the isolated nucleic acid sequence is an RNA sequence.

18. The isolated nucleic acid molecule of claim 1, comprising the sequence SEQ ID NO.: 2, or a combination comprising SEQ ID NO.: 1, followed by SEQ ID NO.: 2658, followed by SEQ ID NO.: 2659.

19. The isolated nucleic acid molecule of claim 1, comprising the sequence selected from a group comprising SEQ ID NO.: 3, SEQ ID NO.: 5, SEQ ID NO.: 6 and combinations thereof.

20. The isolated nucleic acid molecule of claim 1, comprising the sequence selected from a group comprising SEQ ID NOs.: 2618 to 2632, 2634, 2636, 2638, 2640, 2641, 2643, 2645, 2647, 2649, 2651, 2652 and 2654.

21. The isolated nucleic acid molecule of claim 1, wherein the target nucleic acid sequence is an RNA sequence or a miRNA sequence.

22. The isolated nucleic acid molecule of claim 21, wherein the target nucleic acid sequence is a miRNA sequence.

23.-27. (canceled)

28. A method of treating a patient which has a disease or is at increased risk of developing a disease, wherein said method comprises:
(i) providing a sample comprising nucleic acids from a patient and detecting one or more target nucleic acid sequences that bind to an isolated nucleic acid molecule for detecting the presence of a target nucleic acid sequence, wherein the isolated nucleic acid sequence is capable of forming bimolecular interactions with a target nucleic acid sequence, wherein the isolated nucleic acid sequence forms a ternary complex stabilizing a detection agent when binding the target nucleic acid sequence and wherein the isolated nucleic acid sequence comprises the following structure: [chemical structure]
wherein A and B are domains forming stabilizing secondary structures, wherein C1 and C2 are domains that bind to the target nucleic acid sequence, wherein R2 and R4 are regions of nucleic acids that do not bind with the target nucleic acid sequence and wherein R3 is a region of nucleic acids capable of stabilizing a detection agent upon the isolated nucleic acid binding to the target nucleic acid structure, and
(ii) administering to the patient one or more therapeutic agents for the treatment of the disease associated with the one or more target nucleic acid sequences detected in (i).

29. The method of claim 28, wherein the disease is selected from a group consisting of cardiac ischemia, diabetes, sepsis, rheumatoid arthritis, hepatic ischemia, hepatitis C, cardiac disease, Alzheimer's disease, Parkinson's disease, spinal motor neuron disease and cancer.

30. (canceled)

31. A kit comprising:
an isolated nucleic acid molecule for detecting the presence of a target nucleic acid sequence, wherein the isolated nucleic acid sequence is capable of forming bimolecular interactions with a target nucleic acid sequence, wherein the isolated nucleic acid sequence forms a ternary complex stabilizing a detection agent when binding the target nucleic acid sequence and wherein the isolated nucleic acid sequence comprises the following structure: [chemical structure]
wherein A and B are domains forming stabilizing secondary structures,
wherein C1 and C2 are domains that bind to the target nucleic acid sequence, wherein R2 and R4 are regions of nucleic acids that do not bind with the target nucleic acid sequence and wherein R3 is a region of nucleic acids capable of stabilizing a detection agent upon the isolated nucleic acid binding to the target nucleic acid structure; and
a detection agent.

The application's sequence listing, which the Patent Office published only in electronic form, follows.

SEQUENCE LISTING (2659 sequences)

SEQ ID NO: 1 - RNA, 19 nt, Artificial Sequence
  Synthetic Sequence
  misc_feature (19)..(19): (n) is any naturally occurring nucleotide, wherein (n) is the sequence complementary to the target RNA; wherein this (n) is attached to SEQ ID NO 2658
gggacaccugagugucccn

SEQ ID NO: 2 - RNA, 79 nt, Artificial sequence
  Synthetic sequence
uuguugaguagagugugagcuccguaacuaguuacaucacgggagauguaacugaaugaaauggugaaggacgggucca

SEQ ID NO: 3 - RNA, 133 nt, Artificial sequence
  PNDN-dme-miR-1
gggacaccugaguguccccuccauacuucuuuuuguugaguagagugugagcuccguaacuaguuacaucacgggagauguaacugaaugaaauggugaaggacggguccaauuccaggcugcuucggcagcc

SEQ ID NO: 4 - RNA, 22 nt, Artificial sequence
  Drosophila melanogaster dme-miR-1
uggaauguaaagaaguauggag

SEQ ID NO: 5 - RNA, 14 nt, Artificial sequence
  Synthetic sequence
cuccauacuucuuu

SEQ ID NO: 6 - RNA, 6 nt, Artificial sequence
  Synthetic sequence
auucca

SEQ ID NO: 7 - DNA, 74 bp, Artificial sequence
  Synthetic sequence
gtataatacgactcactatagggacacctgagtgtcccctccatacttctttttgttgagtagagtgtgagctc

SEQ ID NO: 8 - DNA, 51 bp, Artificial sequence
  Synthetic sequence
ggctgccgaagcagcctggaattggacccgtccttcaccatttcattcagt

SEQ ID NO: 9 - DNA, 24 bp, Artificial sequence
  Synthetic sequence
gtataatacgactcactataggga

SEQ ID NO: 10 - RNA, 22 nt, Artificial sequence
  >hsa-let-7a-5p MIMAT0000062 Homo sapiens let-7a-5p
ugagguaguagguuguauaguu

SEQ ID NO: 11 - RNA, 22 nt, Artificial sequence
  >hsa-let-7a-2-3p MIMAT0010195 Homo sapiens let-7a-2-3p
cuguacagccuccuagcuuucc

SEQ ID NO: 12 - RNA, 21 nt, Artificial sequence
  >hsa-let-7a-3p MIMAT0004481 Homo sapiens let-7a-3p
cuauacaaucuacugucuuuc

SEQ ID NO: 13 - RNA, 22 nt, Artificial sequence
  >hsa-let-7b-3p MIMAT0004482 Homo sapiens let-7b-3p
cuauacaaccuacugccuuccc

SEQ ID NO: 14 - RNA, 22 nt, Artificial sequence
  >hsa-let-7b-5p MIMAT0000063 Homo sapiens let-7b-5p
ugagguaguagguugugugguu

SEQ ID NO: 15 - RNA, 22 nt, Artificial sequence
  >hsa-let-7c-3p MIMAT0026472 Homo sapiens let-7c-3p
cuguacaaccuucuagcuuucc

SEQ ID NO: 16 - RNA, 22 nt, Artificial sequence
  >hsa-let-7c-5p MIMAT0000064 Homo sapiens let-7c-5p
ugagguaguagguuguaugguu

SEQ ID NO: 17 - RNA, 22 nt, Artificial sequence
  >hsa-let-7d-3p MIMAT0004484 Homo sapiens let-7d-3p
cuauacgaccugcugccuuucu

SEQ ID NO: 18 - RNA, 22 nt, Artificial sequence
  >hsa-let-7d-5p MIMAT0000065 Homo sapiens let-7d-5p
agagguaguagguugcauaguu

SEQ ID NO: 19 - RNA, 22 nt, Artificial sequence
  >hsa-let-7e-3p MIMAT0004485 Homo sapiens let-7e-3p
cuauacggccuccuagcuuucc

SEQ ID NO: 20 - RNA, 22 nt, Artificial sequence
  >hsa-let-7e-5p MIMAT0000066 Homo sapiens let-7e-5p
ugagguaggagguuguauaguu

SEQ ID NO: 21 - RNA, 22 nt, Artificial sequence
  >hsa-let-7f-1-3p MIMAT0004486 Homo sapiens let-7f-1-3p
cuauacaaucuauugccuuccc

SEQ ID NO: 22 - RNA, 22 nt, Artificial sequence
  >hsa-let-7f-2-3p MIMAT0004487 Homo sapiens let-7f-2-3p
cuauacagucuacugucuuucc

SEQ ID NO: 23 - RNA, 22 nt, Artificial sequence
  >hsa-let-7f-5p MIMAT0000067 Homo sapiens let-7f-5p
ugagguaguagauuguauaguu

SEQ ID NO: 24 - RNA, 21 nt, Artificial sequence
  >hsa-let-7g-3p MIMAT0004584 Homo sapiens let-7g-3p
cuguacaggccacugccuugc

SEQ ID NO: 25 - RNA, 22 nt, Artificial sequence
  >hsa-let-7g-5p MIMAT0000414 Homo sapiens let-7g-5p
ugagguaguaguuuguacaguu

SEQ ID NO: 26 - RNA, 22 nt, Artificial sequence
  >hsa-let-7i-3p MIMAT0004585 Homo sapiens let-7i-3p
cugcgcaagcuacugccuugcu

SEQ ID NO: 27 - RNA, 22 nt, Artificial sequence
  >hsa-let-7i-5p MIMAT0000415 Homo sapiens let-7i-5p
ugagguaguaguuugugcuguu

SEQ ID NO: 28 - RNA, 22 nt, Artificial sequence
  >hsa-miR-1-3p MIMAT0000416 Homo sapiens miR-1-3p
uggaauguaaagaaguauguau

SEQ ID NO: 29 - RNA, 22 nt, Artificial sequence
  >hsa-miR-1-5p MIMAT0031892 Homo sapiens miR-1-5p
acauacuucuuuauaugcccau

SEQ ID NO: 30 - RNA, 22 nt, Artificial sequence
  >hsa-miR-100-3p MIMAT0004512 Homo sapiens miR-100-3p
caagcuuguaucuauagguaug

SEQ ID NO: 31 - RNA, 22 nt, Artificial sequence
  >hsa-miR-100-5p MIMAT0000098 Homo sapiens miR-100-5p
aacccguagauccgaacuugug

SEQ ID NO: 32 - RNA, 21 nt, Artificial sequence
  >hsa-miR-101-3p MIMAT0000099 Homo sapiens miR-101-3p
uacaguacugugauaacugaa

SEQ ID NO: 33 - RNA, 22 nt, Artificial sequence
  >hsa-miR-101-5p MIMAT0004513 Homo sapiens miR-101-5p
caguuaucacagugcugaugcu

SEQ ID NO: 34 - RNA, 23 nt, Artificial sequence
  >hsa-miR-103a-2-5p MIMAT0009196 Homo sapiens miR-103a-2-5p
agcuucuuuacagugcugccuug

SEQ ID NO: 35 - RNA, 23 nt, Artificial sequence
  >hsa-miR-103a-3p MIMAT0000101 Homo sapiens miR-103a-3p
agcagcauuguacagggcuauga

SEQ ID NO: 36 - RNA, 23 nt, Artificial sequence
  >hsa-miR-103b MIMAT0007402 Homo sapiens miR-103b
ucauagcccuguacaaugcugcu

SEQ ID NO: 37 - RNA, 22 nt, Artificial sequence
  >hsa-miR-105-3p MIMAT0004516 Homo sapiens miR-105-3p
acggauguuugagcaugugcua

SEQ ID NO: 38 - RNA, 23 nt, Artificial sequence
  >hsa-miR-105-5p MIMAT0000102 Homo sapiens miR-105-5p
ucaaaugcucagacuccuguggu

SEQ ID NO: 39 - RNA, 22 nt, Artificial sequence
  >hsa-miR-106a-3p MIMAT0004517 Homo sapiens miR-106a-3p
cugcaauguaagcacuucuuac

SEQ ID NO: 40 - RNA, 23 nt, Artificial sequence
  >hsa-miR-106a-5p MIMAT0000103 Homo sapiens miR-106a-5p
aaaagugcuuacagugcagguag

SEQ ID NO: 41 - RNA, 22 nt, Artificial sequence
  >hsa-miR-106b-3p MIMAT0004672 Homo sapiens miR-106b-3p
ccgcacuguggguacuugcugc

SEQ ID NO: 42 - RNA, 21 nt, Artificial sequence
  >hsa-miR-106b-5p MIMAT0000680 Homo sapiens miR-106b-5p
uaaagugcugacagugcagau

SEQ ID NO: 43 - RNA, 23 nt, Artificial sequence
  >hsa-miR-107 MIMAT0000104 Homo sapiens miR-107
agcagcauuguacagggcuauca

SEQ ID NO: 44 - RNA, 22 nt, Artificial sequence
  >hsa-miR-10a-3p MIMAT0004555 Homo sapiens miR-10a-3p
caaauucguaucuaggggaaua

SEQ ID NO: 45 - RNA, 23 nt, Artificial sequence
  >hsa-miR-10a-5p MIMAT0000253 Homo sapiens miR-10a-5p
uacccuguagauccgaauuugug

SEQ ID NO: 46 - RNA, 22 nt, Artificial sequence
  >hsa-miR-10b-3p MIMAT0004556 Homo sapiens miR-10b-3p
acagauucgauucuaggggaau

SEQ ID NO: 47 - RNA, 23 nt, Artificial sequence
  >hsa-miR-10b-5p MIMAT0000254 Homo sapiens miR-10b-5p
uacccuguagaaccgaauuugug

SEQ ID NO: 48 - RNA, 21 nt, Artificial sequence
  >hsa-miR-1178-3p MIMAT0005823 Homo sapiens miR-1178-3p
uugcucacuguucuucccuag

SEQ ID NO: 49 - RNA, 18 nt, Artificial sequence
  >hsa-miR-1178-5p MIMAT0022940 Homo sapiens miR-1178-5p
cagggucagcugagcaug

SEQ ID NO: 50 - RNA, 21 nt, Artificial sequence
  >hsa-miR-1179 MIMAT0005824 Homo sapiens miR-1179
aagcauucuuucauugguugg

SEQ ID NO: 51 - RNA, 22 nt, Artificial sequence
  >hsa-miR-1180-3p MIMAT0005825 Homo sapiens miR-1180-3p
uuuccggcucgcgugggugugu

SEQ ID NO: 52 - RNA, 21 nt, Artificial sequence
  >hsa-miR-1180-5p MIMAT0026735 Homo sapiens miR-1180-5p
ggacccacccggccgggaaua

SEQ ID NO: 53 - RNA, 21 nt, Artificial sequence
  >hsa-miR-1181 MIMAT0005826 Homo sapiens miR-1181
ccgucgccgccacccgagccg

SEQ ID NO: 54 - RNA, 23 nt, Artificial sequence
  >hsa-miR-1182 MIMAT0005827 Homo sapiens miR-1182
gagggucuugggagggaugugac

SEQ ID NO: 55 - RNA, 27 nt, Artificial sequence
  >hsa-miR-1183 MIMAT0005828 Homo sapiens miR-1183
cacuguaggugauggugagagugggca

SEQ ID NO: 56 - RNA, 23 nt, Artificial sequence
  >hsa-miR-1184 MIMAT0005829 Homo sapiens miR-1184
ccugcagcgacuugauggcuucc

SEQ ID NO: 57 - RNA, 22 nt, Artificial sequence
  >hsa-miR-1185-1-3p MIMAT0022838 Homo sapiens miR-1185-1-3p
auauacagggggagacucuuau

SEQ ID NO: 58 - RNA, 22 nt, Artificial sequence
  >hsa-miR-1185-2-3p MIMAT0022713 Homo sapiens miR-1185-2-3p
auauacagggggagacucucau

SEQ ID NO: 59 - RNA, 21 nt, Artificial sequence
  >hsa-miR-1185-5p MIMAT0005798 Homo sapiens miR-1185-5p
agaggauacccuuuguauguu

SEQ ID NO: 60 - RNA, 23 nt, Artificial sequence
  >hsa-miR-1193 MIMAT0015049 Homo sapiens miR-1193
gggaugguagaccggugacgugc

SEQ ID NO: 61 - RNA, 21 nt, Artificial sequence
  >hsa-miR-1197 MIMAT0005955 Homo sapiens miR-1197
uaggacacauggucuacuucu

SEQ ID NO: 62 - RNA, 21 nt, Artificial sequence
  >hsa-miR-1199-3p MIMAT0031120 Homo sapiens miR-1199-3p
ugcggccggugcucaaccugc

SEQ ID NO: 63 - RNA, 20 nt, Artificial sequence
  >hsa-miR-1199-5p MIMAT0031119 Homo sapiens miR-1199-5p
ccugagcccgggccgcgcag

SEQ ID NO: 64 - RNA, 22 nt, Artificial sequence
  >hsa-miR-1200 MIMAT0005863 Homo sapiens miR-1200
cuccugagccauucugagccuc

SEQ ID NO: 65 - RNA, 21 nt, Artificial sequence
  >hsa-miR-1202 MIMAT0005865 Homo sapiens miR-1202
gugccagcugcagugggggag

SEQ ID NO: 66 - RNA, 21 nt, Artificial sequence
  >hsa-miR-1203 MIMAT0005866 Homo sapiens miR-1203
cccggagccaggaugcagcuc

SEQ ID NO: 67 - RNA, 21 nt, Artificial sequence
  >hsa-miR-1204 MIMAT0005868 Homo sapiens miR-1204
ucguggccuggucuccauuau

SEQ ID NO: 68 - RNA, 20 nt, Artificial sequence
  >hsa-miR-1205 MIMAT0005869 Homo sapiens miR-1205
ucugcaggguuugcuuugag

SEQ ID NO: 69 - RNA, 21 nt, Artificial sequence
  >hsa-miR-1206 MIMAT0005870 Homo sapiens miR-1206
uguucauguagauguuuaagc

SEQ ID NO: 70 - RNA, 18 nt, Artificial sequence
  >hsa-miR-1207-3p MIMAT0005872 Homo sapiens miR-1207-3p
ucagcuggcccucauuuc

SEQ ID NO: 71 - RNA, 21 nt, Artificial sequence
  >hsa-miR-1207-5p MIMAT0005871 Homo sapiens miR-1207-5p
uggcagggaggcugggagggg

SEQ ID NO: 72 - RNA, 20 nt, Artificial sequence
  >hsa-miR-1208 MIMAT0005873 Homo sapiens miR-1208
ucacuguucagacaggcgga

SEQ ID NO: 73 - RNA, 22 nt, Artificial sequence
  >hsa-miR-122-3p MIMAT0004590 Homo sapiens miR-122-3p
aacgccauuaucacacuaaaua

SEQ ID NO: 74 - RNA, 22 nt, Artificial sequence
  >hsa-miR-122-5p MIMAT0000421 Homo sapiens miR-122-5p; hsa_miR-122
uggagugugacaaugguguuug

SEQ ID NO: 75 - RNA, 21 nt, Artificial sequence
  >hsa-miR-1224-3p MIMAT0005459 Homo sapiens miR-1224-3p
ccccaccuccucucuccucag

SEQ ID NO: 76 - RNA, 19 nt, Artificial sequence
  >hsa-miR-1224-5p MIMAT0005458 Homo sapiens miR-1224-5p
gugaggacucgggaggugg

SEQ ID NO: 77 - RNA, 22 nt, Artificial sequence
  >hsa-miR-1225-3p MIMAT0005573 Homo sapiens miR-1225-3p
ugagccccugugccgcccccag

SEQ ID NO: 78 - RNA, 22 nt, Artificial sequence
  >hsa-miR-1225-5p MIMAT0005572 Homo sapiens miR-1225-5p
guggguacggcccagugggggg

SEQ ID NO: 79 - RNA, 22 nt, Artificial sequence
  >hsa-miR-1226-3p MIMAT0005577 Homo sapiens miR-1226-3p
ucaccagcccuguguucccuag

SEQ ID NO: 80 - RNA, 26 nt, Artificial sequence
  >hsa-miR-1226-5p MIMAT0005576 Homo sapiens miR-1226-5p
gugagggcaugcaggccuggaugggg

SEQ ID NO: 81 - RNA, 20 nt, Artificial sequence
  >hsa-miR-1227-3p MIMAT0005580 Homo sapiens miR-1227-3p
cgugccacccuuuuccccag

SEQ ID NO: 82 - RNA, 17 nt, Artificial sequence
  >hsa-miR-1227-5p MIMAT0022941 Homo sapiens miR-1227-5p
guggggccaggcggugg

SEQ ID NO: 83 - RNA, 20 nt, Artificial sequence
  >hsa-miR-1228-3p MIMAT0005583 Homo sapiens miR-1228-3p
ucacaccugccucgcccccc

SEQ ID NO: 84 - RNA, 21 nt, Artificial sequence
  >hsa-miR-1228-5p MIMAT0005582 Homo sapiens miR-1228-5p
gugggcgggggcaggugugug

SEQ ID NO: 85 - RNA, 23 nt, Artificial sequence
  >hsa-miR-1229-3p MIMAT0005584 Homo sapiens miR-1229-3p
cucucaccacugcccucccacag

SEQ ID NO: 86 - RNA, 24 nt, Artificial sequence
  >hsa-miR-1229-5p MIMAT0022942 Homo sapiens miR-1229-5p
guggguaggguuugggggagagcg

SEQ ID NO: 87 - RNA, 20 nt, Artificial sequence
  >hsa-miR-1231 MIMAT0005586 Homo sapiens miR-1231
gugucugggcggacagcugc

SEQ ID NO: 88 - RNA, 20 nt, Artificial sequence
  >hsa-miR-1233-3p MIMAT0005588 Homo sapiens miR-1233-3p
ugagcccuguccucccgcag

SEQ ID NO: 89 - RNA, 22 nt, Artificial sequence
  >hsa-miR-1233-5p MIMAT0022943 Homo sapiens miR-1233-5p
agugggaggccagggcacggca

SEQ ID NO: 90 - RNA, 22 nt, Artificial sequence
  >hsa-miR-1234-3p MIMAT0005589 Homo sapiens miR-1234-3p
ucggccugaccacccaccccac

SEQ ID NO: 91 - RNA, 22 nt, Artificial sequence
  >hsa-miR-1236-3p MIMAT0005591 Homo sapiens miR-1236-3p
ccucuuccccuugucucuccag

SEQ ID NO: 92 - RNA, 22 nt, Artificial sequence
  >hsa-miR-1236-5p MIMAT0022945 Homo sapiens miR-1236-5p
ugagugacaggggaaaugggga

SEQ ID NO: 93 - RNA, 21 nt, Artificial sequence
  >hsa-miR-1237-3p MIMAT0005592 Homo sapiens miR-1237-3p
uccuucugcuccgucccccag

SEQ ID NO: 94 - RNA, 21 nt, Artificial sequence
  >hsa-miR-1237-5p MIMAT0022946 Homo sapiens miR-1237-5p
cgggggcggggccgaagcgcg

SEQ ID NO: 95 - RNA, 20 nt, Artificial sequence
  >hsa-miR-1238-3p MIMAT0005593 Homo sapiens miR-1238-3p
cuuccucgucugucugcccc

SEQ ID NO: 96 - RNA, 23 nt, Artificial sequence
  >hsa-miR-1238-5p MIMAT0022947 Homo sapiens miR-1238-5p
gugagugggagccccagugugug

SEQ ID NO: 97 - RNA, 20 nt, Artificial sequence
  >hsa-miR-124-3p MIMAT0000422 Homo sapiens miR-124-3p
uaaggcacgcggugaaugcc

SEQ ID NO: 98 - RNA, 22 nt, Artificial sequence
  >hsa-miR-124-5p MIMAT0004591 Homo sapiens miR-124-5p
cguguucacagcggaccuugau

SEQ ID NO: 99 - RNA, 22 nt, Artificial sequence
  >hsa-miR-1243 MIMAT0005894 Homo sapiens miR-1243
aacuggaucaauuauaggagug

SEQ ID NO: 100 - RNA, 26 nt, Artificial sequence
  >hsa-miR-1244 MIMAT0005896 Homo sapiens miR-1244
aaguaguugguuuguaugagaugguu

SEQ ID NO: 101 - RNA, 21 nt, Artificial sequence
  >hsa-miR-1245a MIMAT0005897 Homo sapiens miR-1245a
aagugaucuaaaggccuacau

SEQ ID NO: 102 - RNA, 22 nt, Artificial sequence
  >hsa-miR-1245b-3p MIMAT0019951 Homo sapiens miR-1245b-3p
ucagaugaucuaaaggccuaua

SEQ ID NO: 103 - RNA, 21 nt, Artificial sequence
  >hsa-miR-1245b-5p MIMAT0019950 Homo sapiens miR-1245b-5p
uaggccuuuagaucacuuaaa

SEQ ID NO: 104 - RNA, 19 nt, Artificial sequence
  >hsa-miR-1246 MIMAT0005898 Homo sapiens miR-1246
aauggauuuuuggagcagg

SEQ ID NO: 105 - RNA, 24 nt, Artificial sequence
  >hsa-miR-1247-3p MIMAT0022721 Homo sapiens miR-1247-3p
ccccgggaacgucgagacuggagc

SEQ ID NO: 106 - RNA, 22 nt, Artificial sequence
  >hsa-miR-1247-5p MIMAT0005899 Homo sapiens miR-1247-5p
acccgucccguucguccccgga

SEQ ID NO: 107 - RNA, 27 nt, Artificial sequence
  >hsa-miR-1248 MIMAT0005900 Homo sapiens miR-1248
accuucuuguauaagcacugugcuaaa

SEQ ID NO: 108 - RNA, 22 nt, Artificial sequence
  >hsa-miR-1249-3p MIMAT0005901 Homo sapiens miR-1249-3p
acgcccuucccccccuucuuca

SEQ ID NO: 109 - RNA, 24 nt, Artificial sequence
  >hsa-miR-1249-5p MIMAT0032029 Homo sapiens miR-1249-5p
aggagggaggagaugggccaaguu

SEQ ID NO: 110 - RNA, 19 nt, Artificial sequence
  >hsa-miR-1250-3p MIMAT0026740 Homo sapiens miR-1250-3p
acauuuuccagcccauuca

SEQ ID NO: 111 - RNA, 21 nt, Artificial sequence
  >hsa-miR-1250-5p MIMAT0005902 Homo sapiens miR-1250-5p
acggugcuggauguggccuuu

SEQ ID NO: 112 - RNA, 21 nt, Artificial sequence
  >hsa-miR-1251-3p MIMAT0026741 Homo sapiens miR-1251-3p
cgcuuugcucagccaguguag

SEQ ID NO: 113 - RNA, 21 nt, Artificial sequence
  >hsa-miR-1251-5p MIMAT0005903 Homo sapiens miR-1251-5p
acucuagcugccaaaggcgcu

SEQ ID NO: 114 - RNA, 22 nt, Artificial sequence
  >hsa-miR-1252-3p MIMAT0026744 Homo sapiens miR-1252-3p
caaaugagcuuaauuuccuuuu

SEQ ID NO: 115 - RNA, 22 nt, Artificial sequence
  >hsa-miR-1252-5p MIMAT0005944 Homo sapiens miR-1252-5p
agaaggaaauugaauucauuua

SEQ ID NO: 116 - RNA, 21 nt, Artificial sequence
  >hsa-miR-1253 MIMAT0005904 Homo sapiens miR-1253
agagaagaagaucagccugca

SEQ ID NO: 117 - RNA, 24 nt, Artificial sequence
  >hsa-miR-1254 MIMAT0005905 Homo sapiens miR-1254
agccuggaagcuggagccugcagu

SEQ ID NO: 118 - RNA, 23 nt, Artificial sequence
  >hsa-miR-1255a MIMAT0005906 Homo sapiens miR-1255a
aggaugagcaaagaaaguagauu

SEQ ID NO: 119 - RNA, 22 nt, Artificial sequence
  >hsa-miR-1255b-2-3p MIMAT0022725 Homo sapiens miR-1255b-2-3p
aaccacuuucuuugcucaucca

SEQ ID NO: 120 - RNA, 22 nt, Artificial sequence
  >hsa-miR-1255b-5p MIMAT0005945 Homo sapiens miR-1255b-5p
cggaugagcaaagaaagugguu

SEQ ID NO: 121 - RNA, 22 nt, Artificial sequence
  >hsa-miR-1256 MIMAT0005907 Homo sapiens miR-1256
aggcauugacuucucacuagcu

SEQ ID NO: 122 - RNA, 21 nt, Artificial sequence
  >hsa-miR-1257 MIMAT0005908 Homo sapiens miR-1257
agugaaugauggguucugacc

SEQ ID NO: 123 - RNA, 21 nt, Artificial sequence
  >hsa-miR-1258 MIMAT0005909 Homo sapiens miR-1258
aguuaggauuaggucguggaa

SEQ ID NO: 124 - RNA, 22 nt, Artificial sequence
  >hsa-miR-125a-3p MIMAT0004602 Homo sapiens miR-125a-3p
acaggugagguucuugggagcc

SEQ ID NO: 125 - RNA, 24 nt, Artificial sequence
  >hsa-miR-125a-5p MIMAT0000443 Homo sapiens miR-125a-5p
ucccugagacccuuuaaccuguga

SEQ ID NO: 126 - RNA, 22 nt, Artificial sequence
  >hsa-miR-125b-1-3p MIMAT0004592 Homo sapiens miR-125b-1-3p
acggguuaggcucuugggagcu

SEQ ID NO: 127 - RNA, 22 nt, Artificial sequence
  >hsa-miR-125b-2-3p MIMAT0004603 Homo sapiens miR-125b-2-3p
ucacaagucaggcucuugggac

SEQ ID NO: 128 - RNA, 22 nt, Artificial sequence
  >hsa-miR-125b-5p MIMAT0000423 Homo sapiens miR-125b-5p
ucccugagacccuaacuuguga

SEQ ID NO: 129 - RNA, 22 nt, Artificial sequence
  >hsa-miR-126-3p MIMAT0000445 Homo sapiens miR-126-3p
ucguaccgugaguaauaaugcg

SEQ ID NO: 130 - RNA, 21 nt, Artificial sequence
  >hsa-miR-126-5p MIMAT0000444 Homo sapiens miR-126-5p
cauuauuacuuuugguacgcg

SEQ ID NO: 131 - RNA, 18 nt, Artificial sequence
  >hsa-miR-1260a MIMAT0005911 Homo sapiens miR-1260a
aucccaccucugccacca

SEQ ID NO: 132 - RNA, 19 nt, Artificial sequence
  >hsa-miR-1260b MIMAT0015041 Homo sapiens miR-1260b
aucccaccacugccaccau

SEQ ID NO: 133 - RNA, 19 nt, Artificial sequence
  >hsa-miR-1261 MIMAT0005913 Homo sapiens miR-1261
auggauaaggcuuuggcuu

SEQ ID NO: 134 - RNA, 22 nt, Artificial sequence
  >hsa-miR-1262 MIMAT0005914 Homo sapiens miR-1262
augggugaauuuguagaaggau

SEQ ID NO: 135 - RNA, 22 nt, Artificial sequence
  >hsa-miR-1263 MIMAT0005915 Homo sapiens miR-1263
augguacccuggcauacugagu

SEQ ID NO: 136 - RNA, 23 nt, Artificial sequence
  >hsa-miR-1264 MIMAT0005791 Homo sapiens miR-1264
caagucuuauuugagcaccuguu

SEQ ID NO: 137 - RNA, 22 nt, Artificial sequence
  >hsa-miR-1265 MIMAT0005918 Homo sapiens miR-1265
caggauguggucaaguguuguu

SEQ ID NO: 138 - RNA, 22 nt, Artificial sequence
  >hsa-miR-1266-3p MIMAT0026742 Homo sapiens miR-1266-3p
cccuguucuaugcccugaggga

SEQ ID NO: 139 - RNA, 23 nt, Artificial sequence
  >hsa-miR-1266-5p MIMAT0005920 Homo sapiens miR-1266-5p
ccucagggcuguagaacagggcu

SEQ ID NO: 140 - RNA, 21 nt, Artificial sequence
  >hsa-miR-1267 MIMAT0005921 Homo sapiens miR-1267
ccuguugaaguguaaucccca

SEQ ID NO: 141 - RNA, 18 nt, Artificial sequence
  >hsa-miR-1268a MIMAT0005922 Homo sapiens miR-1268a
cgggcguggugguggggg

SEQ ID NO: 142 - RNA, 20 nt, Artificial sequence
  >hsa-miR-1268b MIMAT0018925 Homo sapiens miR-1268b
cgggcgugguggugggggug

SEQ ID NO: 143 - RNA, 22 nt, Artificial sequence
  >hsa-miR-1269a MIMAT0005923 Homo sapiens miR-1269a
cuggacugagccgugcuacugg

SEQ ID NO: 144 - RNA, 22 nt, Artificial sequence
  >hsa-miR-1269b MIMAT0019059 Homo sapiens miR-1269b
cuggacugagccaugcuacugg

SEQ ID NO: 145 - RNA, 22 nt, Artificial sequence
  >hsa-miR-127-3p MIMAT0000446 Homo sapiens miR-127-3p
ucggauccgucugagcuuggcu

SEQ ID NO: 146 - RNA, 22 nt, Artificial sequence
  >hsa-miR-127-5p MIMAT0004604 Homo sapiens miR-127-5p
cugaagcucagagggcucugau

SEQ ID NO: 147 - RNA, 23 nt, Artificial sequence
  >hsa-miR-1270 MIMAT0005924 Homo sapiens miR-1270
cuggagauauggaagagcugugu

SEQ ID NO: 148 - RNA, 22 nt, Artificial sequence
  >hsa-miR-1271-3p MIMAT0022712 Homo sapiens miR-1271-3p
agugccugcuaugugccaggca

SEQ ID NO: 149 - RNA, 22 nt, Artificial sequence
  >hsa-miR-1271-5p MIMAT0005796 Homo sapiens miR-1271-5p
cuuggcaccuagcaagcacuca

SEQ ID NO: 150 - RNA, 26 nt, Artificial sequence
  >hsa-miR-1272 MIMAT0005925 Homo sapiens miR-1272
gaugaugauggcagcaaauucugaaa

SEQ ID NO: 151 - RNA, 25 nt, Artificial sequence
  >hsa-miR-1273a MIMAT0005926 Homo sapiens miR-1273a
gggcgacaaagcaagacucuuucuu

SEQ ID NO: 152 - RNA, 22 nt, Artificial sequence
  >hsa-miR-1273c MIMAT0015017 Homo sapiens miR-1273c
ggcgacaaaacgagacccuguc

SEQ ID NO: 153 - RNA, 25 nt, Artificial sequence
  >hsa-miR-1273d MIMAT0015090 Homo sapiens miR-1273d
gaacccaugagguugaggcugcagu

SEQ ID NO: 154 - RNA, 22 nt, Artificial sequence
  >hsa-miR-1273e MIMAT0018079 Homo sapiens miR-1273e
uugcuugaacccaggaagugga

SEQ ID NO: 155 - RNA, 19 nt, Artificial sequence
  >hsa-miR-1273f MIMAT0020601 Homo sapiens miR-1273f
ggagauggagguugcagug

SEQ ID NO: 156 - RNA, 21 nt, Artificial sequence
  >hsa-miR-1273g-3p MIMAT0022742 Homo sapiens miR-1273g-3p
accacugcacuccagccugag

SEQ ID NO: 157 - RNA, 22 nt, Artificial sequence
  >hsa-miR-1273g-5p MIMAT0020602 Homo sapiens miR-1273g-5p
ggugguugaggcugcaguaagu

SEQ ID NO: 158 - RNA, 22 nt, Artificial sequence
  >hsa-miR-1273h-3p MIMAT0030416 Homo sapiens miR-1273h-3p
cugcagacucgaccucccaggc

SEQ ID NO: 159 - RNA, 21 nt, Artificial sequence
  >hsa-miR-1273h-5p MIMAT0030415 Homo sapiens miR-1273h-5p
cugggaggucaaggcugcagu

SEQ ID NO: 160 - RNA, 17 nt, Artificial sequence
  >hsa-miR-1275 MIMAT0005929 Homo sapiens miR-1275
gugggggagaggcuguc

SEQ ID NO: 161 - RNA, 20 nt, Artificial sequence
  >hsa-miR-1276 MIMAT0005930 Homo sapiens miR-1276
uaaagagcccuguggagaca

SEQ ID NO: 162 - RNA, 22 nt, Artificial sequence
  >hsa-miR-1277-3p MIMAT0005933 Homo sapiens miR-1277-3p
uacguagauauauauguauuuu

SEQ ID NO: 163 - RNA, 24 nt, Artificial sequence
  >hsa-miR-1277-5p MIMAT0022724 Homo sapiens miR-1277-5p
aaauauauauauauauguacguau

SEQ ID NO: 164 - RNA, 22 nt, Artificial sequence
  >hsa-miR-1278 MIMAT0005936 Homo sapiens miR-1278
uaguacugugcauaucaucuau

SEQ ID NO: 165 - RNA, 17 nt, Artificial sequence
  >hsa-miR-1279 MIMAT0005937 Homo sapiens miR-1279
ucauauugcuucuuucu

SEQ ID NO: 166 - RNA, 23 nt, Artificial sequence
  >hsa-miR-128-1-5p MIMAT0026477 Homo sapiens miR-128-1-5p
cggggccguagcacugucugaga

SEQ ID NO: 167 - RNA, 23 nt, Artificial sequence
  >hsa-miR-128-2-5p MIMAT0031095 Homo sapiens miR-128-2-5p
gggggccgauacacuguacgaga

SEQ ID NO: 168 - RNA, 21 nt, Artificial sequence
  >hsa-miR-128-3p MIMAT0000424 Homo sapiens miR-128-3p
ucacagugaaccggucucuuu

SEQ ID NO: 169 - RNA, 17 nt, Artificial sequence
  >hsa-miR-1281 MIMAT0005939 Homo sapiens miR-1281
ucgccuccuccucuccc

SEQ ID NO: 170 - RNA, 20 nt, Artificial sequence
  >hsa-miR-1282 MIMAT0005940 Homo sapiens miR-1282
ucguuugccuuuuucugcuu

SEQ ID NO: 171 - RNA, 22 nt, Artificial sequence
  >hsa-miR-1283 MIMAT0005799 Homo sapiens miR-1283
ucuacaaaggaaagcgcuuucu

SEQ ID NO: 172 - RNA, 22 nt, Artificial sequence
  >hsa-miR-1284 MIMAT0005941 Homo sapiens miR-1284
ucuauacagacccuggcuuuuc

SEQ ID NO: 173 - RNA, 22 nt, Artificial sequence
  >hsa-miR-1285-3p MIMAT0005876 Homo sapiens miR-1285-3p
ucugggcaacaaagugagaccu

SEQ ID NO: 174 - RNA, 21 nt, Artificial sequence
  >hsa-miR-1285-5p MIMAT0022719 Homo sapiens miR-1285-5p
gaucucacuuuguugcccagg

SEQ ID NO: 175 - RNA, 21 nt, Artificial sequence
  >hsa-miR-1286 MIMAT0005877 Homo sapiens miR-1286
ugcaggaccaagaugagcccu

SEQ ID NO: 176 - RNA, 22 nt, Artificial sequence
  >hsa-miR-1287-3p MIMAT0026738 Homo sapiens miR-1287-3p
cucuagccacagaugcagugau

SEQ ID NO: 177 - RNA, 22 nt, Artificial sequence
  >hsa-miR-1287-5p MIMAT0005878 Homo sapiens miR-1287-5p
ugcuggaucagugguucgaguc

SEQ ID NO: 178 - RNA, 21 nt, Artificial sequence
  >hsa-miR-1288-3p MIMAT0005942 Homo sapiens miR-1288-3p
uggacugcccugaucuggaga

SEQ ID NO: 179 - RNA, 23 nt, Artificial sequence
  >hsa-miR-1288-5p MIMAT0026743 Homo sapiens miR-1288-5p
gcagaucaggacuguaacucacc

SEQ ID NO: 180 - RNA, 23 nt, Artificial sequence
  >hsa-miR-1289 MIMAT0005879 Homo sapiens miR-1289
uggaguccaggaaucugcauuuu

SEQ ID NO: 181 - RNA, 22 nt, Artificial sequence
  >hsa-miR-129-1-3p MIMAT0004548 Homo sapiens miR-129-1-3p
aagcccuuaccccaaaaaguau

SEQ ID NO: 182 - RNA, 22 nt, Artificial sequence
  >hsa-miR-129-2-3p MIMAT0004605 Homo sapiens miR-129-2-3p
aagcccuuaccccaaaaagcau

SEQ ID NO: 183 - RNA, 21 nt, Artificial sequence
  >hsa-miR-129-5p MIMAT0000242 Homo sapiens miR-129-5p
cuuuuugcggucugggcuugc

SEQ ID NO: 184 - RNA, 19 nt, Artificial sequence
  >hsa-miR-1290 MIMAT0005880 Homo sapiens miR-1290
uggauuuuuggaucaggga

SEQ ID NO: 185 - RNA, 24 nt, Artificial sequence
  >hsa-miR-1291 MIMAT0005881 Homo sapiens miR-1291
uggcccugacugaagaccagcagu

SEQ ID NO: 186 - RNA, 20 nt, Artificial sequence
  >hsa-miR-1292-3p MIMAT0022948 Homo sapiens miR-1292-3p
ucgcgccccggcucccguuc

SEQ ID NO: 187 - RNA, 25 nt, Artificial sequence
  >hsa-miR-1292-5p MIMAT0005943 Homo sapiens miR-1292-5p
ugggaacggguuccggcagacgcug

SEQ ID NO: 188 - RNA, 22 nt, Artificial sequence
  >hsa-miR-1293 MIMAT0005883 Homo sapiens miR-1293
uggguggucuggagauuugugc

SEQ ID NO: 189 - RNA, 22 nt, Artificial sequence
  >hsa-miR-1294 MIMAT0005884 Homo sapiens miR-1294
ugugagguuggcauuguugucu

SEQ ID NO: 190 - RNA, 21 nt, Artificial sequence
  >hsa-miR-1295a MIMAT0005885 Homo sapiens miR-1295a
uuaggccgcagaucuggguga

SEQ ID NO: 191 - RNA, 22 nt, Artificial sequence
  >hsa-miR-1295b-3p MIMAT0022294 Homo sapiens miR-1295b-3p
aauaggccacggaucugggcaa

SEQ ID NO: 192 - RNA, 21 nt, Artificial sequence
  >hsa-miR-1295b-5p MIMAT0022293 Homo sapiens miR-1295b-5p
cacccagaucugcggccuaau

SEQ ID NO: 193 - RNA, 22 nt, Artificial sequence
  >hsa-miR-1296-3p MIMAT0026637 Homo sapiens miR-1296-3p
gaguggggcuucgacccuaacc

SEQ ID NO: 194 - RNA, 22 nt, Artificial sequence
  >hsa-miR-1296-5p MIMAT0005794 Homo sapiens miR-1296-5p
uuagggcccuggcuccaucucc

SEQ ID NO: 195 - RNA, 17 nt, Artificial sequence
  >hsa-miR-1297 MIMAT0005886 Homo sapiens miR-1297
uucaaguaauucaggug

SEQ ID NO: 196 - RNA, 21 nt, Artificial sequence
  >hsa-miR-1298-3p MIMAT0026641 Homo sapiens miR-1298-3p
caucugggcaacugacugaac

SEQ ID NO: 197 - RNA, 22 nt, Artificial sequence
  >hsa-miR-1298-5p MIMAT0005800 Homo sapiens miR-1298-5p
uucauucggcuguccagaugua

SEQ ID NO: 198 - RNA, 22 nt, Artificial sequence
  >hsa-miR-1299 MIMAT0005887 Homo sapiens miR-1299
uucuggaauucugugugaggga

SEQ ID NO: 199 - RNA, 24 nt, Artificial sequence
  >hsa-miR-1301-3p MIMAT0005797 Homo sapiens miR-1301-3p
uugcagcugccugggagugacuuc

SEQ ID NO: 200 - RNA, 19 nt, Artificial sequence
  >hsa-miR-1301-5p MIMAT0026639 Homo sapiens miR-1301-5p
cgcucuaggcaccgcagca

SEQ ID NO: 201 - RNA, 21 nt, Artificial sequence
  >hsa-miR-1302 MIMAT0005890 Homo sapiens miR-1302
uugggacauacuuaugcuaaa

SEQ ID NO: 202 - RNA, 22 nt, Artificial sequence
  >hsa-miR-1303 MIMAT0005891 Homo sapiens miR-1303
uuuagagacggggucuugcucu

SEQ ID NO: 203 - RNA, 22 nt, Artificial sequence
  >hsa-miR-1304-3p MIMAT0022720 Homo sapiens miR-1304-3p
ucucacuguagccucgaacccc

SEQ ID NO: 204 - RNA, 22 nt, Artificial sequence
  >hsa-miR-1304-5p MIMAT0005892 Homo sapiens miR-1304-5p
uuugaggcuacagugagaugug

SEQ ID NO: 205 - RNA, 22 nt, Artificial sequence
  >hsa-miR-1305 MIMAT0005893 Homo sapiens miR-1305
uuuucaacucuaaugggagaga

SEQ ID NO: 206 - RNA, 18 nt, Artificial sequence
  >hsa-miR-1306-3p MIMAT0005950 Homo sapiens miR-1306-3p
acguuggcucugguggug

SEQ ID NO: 207 - RNA, 22 nt, Artificial sequence
  >hsa-miR-1306-5p MIMAT0022726 Homo sapiens miR-1306-5p
ccaccuccccugcaaacgucca

SEQ ID NO: 208 - RNA, 22 nt, Artificial sequence
  >hsa-miR-1307-3p MIMAT0005951 Homo sapiens miR-1307-3p
acucggcguggcgucggucgug

SEQ ID NO: 209 - RNA, 21 nt, Artificial sequence
  >hsa-miR-1307-5p MIMAT0022727 Homo sapiens miR-1307-5p
ucgaccggaccucgaccggcu

SEQ ID NO: 210 - RNA, 22 nt, Artificial sequence
  >hsa-miR-130a-3p MIMAT0000425 Homo sapiens miR-130a-3p
cagugcaauguuaaaagggcau

SEQ ID NO: 211 - RNA, 22 nt, Artificial sequence
  >hsa-miR-130a-5p MIMAT0004593 Homo sapiens miR-130a-5p
uucacauugugcuacugucugc

SEQ ID NO: 212 - RNA, 22 nt, Artificial sequence
  >hsa-miR-130b-3p MIMAT0000691 Homo sapiens miR-130b-3p
cagugcaaugaugaaagggcau

SEQ ID NO: 213 - RNA, 21 nt, Artificial sequence
  >hsa-miR-130b-5p MIMAT0004680 Homo sapiens miR-130b-5p
acucuuucccuguugcacuac

SEQ ID NO: 214 - RNA, 22 nt, Artificial sequence
  >hsa-miR-132-3p MIMAT0000426 Homo sapiens miR-132-3p
uaacagucuacagccauggucg

SEQ ID NO: 215 - RNA, 22 nt, Artificial sequence
  >hsa-miR-132-5p MIMAT0004594 Homo sapiens miR-132-5p
accguggcuuucgauuguuacu

SEQ ID NO: 216 - RNA, 18 nt, Artificial sequence
  >hsa-miR-1321 MIMAT0005952 Homo sapiens miR-1321
cagggaggugaaugugau

SEQ ID NO: 217 - RNA, 19 nt, Artificial sequence
  >hsa-miR-1322 MIMAT0005953 Homo sapiens miR-1322
gaugaugcugcugaugcug

SEQ ID NO: 218 - RNA, 22 nt, Artificial sequence
  >hsa-miR-1323 MIMAT0005795 Homo sapiens miR-1323
ucaaaacugaggggcauuuucu

SEQ ID NO: 219 - RNA, 24 nt, Artificial sequence
  >hsa-miR-1324 MIMAT0005956 Homo sapiens miR-1324
ccagacagaauucuaugcacuuuc

SEQ ID NO: 220 - RNA, 22 nt, Artificial sequence
  >hsa-miR-133a-3p MIMAT0000427 Homo sapiens miR-133a-3p
uuugguccccuucaaccagcug

SEQ ID NO: 221 - RNA, 22 nt, Artificial sequence
  >hsa-miR-133a-5p MIMAT0026478 Homo sapiens miR-133a-5p
agcugguaaaauggaaccaaau

SEQ ID NO: 222 - RNA, 22 nt, Artificial sequence
  >hsa-miR-133b MIMAT0000770 Homo sapiens miR-133b
uuugguccccuucaaccagcua

SEQ ID NO: 223 - RNA, 23 nt, Artificial sequence
  >hsa-miR-134-3p MIMAT0026481 Homo sapiens miR-134-3p
ccugugggccaccuagucaccaa

SEQ ID NO: 224 - RNA, 22 nt, Artificial sequence
  >hsa-miR-134-5p MIMAT0000447 Homo sapiens miR-134-5p
ugugacugguugaccagagggg

SEQ ID NO: 225 - RNA, 22 nt, Artificial sequence
  >hsa-miR-1343-3p MIMAT0019776 Homo sapiens miR-1343-3p
cuccuggggcccgcacucucgc

SEQ ID NO: 226 - RNA, 22 nt, Artificial sequence
  >hsa-miR-1343-5p MIMAT0027038 Homo sapiens miR-1343-5p
uggggagcggcccccggguggg

SEQ ID NO: 227 - RNA, 22 nt, Artificial sequence
  >hsa-miR-135a-3p MIMAT0004595 Homo sapiens miR-135a-3p
uauagggauuggagccguggcg

SEQ ID NO: 228 - RNA, 23 nt, Artificial sequence
  >hsa-miR-135a-5p MIMAT0000428 Homo sapiens miR-135a-5p
uauggcuuuuuauuccuauguga

SEQ ID NO: 229 - RNA, 22 nt, Artificial sequence
  >hsa-miR-135b-3p MIMAT0004698 Homo sapiens miR-135b-3p
auguagggcuaaaagccauggg

SEQ ID NO: 230 - RNA, 23 nt, Artificial sequence
  >hsa-miR-135b-5p MIMAT0000758 Homo sapiens miR-135b-5p
uauggcuuuucauuccuauguga

SEQ ID NO: 231 - RNA, 22 nt, Artificial sequence
  >hsa-miR-136-3p MIMAT0004606 Homo sapiens miR-136-3p
caucaucgucucaaaugagucu

SEQ ID NO: 232 - RNA, 23 nt, Artificial sequence
  >hsa-miR-136-5p MIMAT0000448 Homo sapiens miR-136-5p
acuccauuuguuuugaugaugga

SEQ ID NO: 233 - RNA, 23 nt, Artificial sequence
  >hsa-miR-137 MIMAT0000429 Homo sapiens miR-137
uuauugcuuaagaauacgcguag

SEQ ID NO: 234 - RNA, 22 nt, Artificial sequence
  >hsa-miR-138-1-3p MIMAT0004607 Homo sapiens miR-138-1-3p
gcuacuucacaacaccagggcc

SEQ ID NO: 235 - RNA, 22 nt, Artificial sequence
  >hsa-miR-138-2-3p MIMAT0004596 Homo sapiens miR-138-2-3p
gcuauuucacgacaccaggguu

SEQ ID NO: 236 - RNA, 23 nt, Artificial sequence
  >hsa-miR-138-5p MIMAT0000430 Homo sapiens miR-138-5p
agcugguguugugaaucaggccg

SEQ ID NO: 237 - RNA, 23 nt, Artificial sequence
  >hsa-miR-139-3p MIMAT0004552 Homo sapiens miR-139-3p
uggagacgcggcccuguuggagu

SEQ ID NO: 238 - RNA, 23 nt, Artificial sequence
  >hsa-miR-139-5p MIMAT0000250 Homo sapiens miR-139-5p
ucuacagugcacgugucuccagu

SEQ ID NO: 239 - RNA, 21 nt, Artificial sequence
  >hsa-miR-140-3p MIMAT0004597 Homo sapiens miR-140-3p
uaccacaggguagaaccacgg

SEQ ID NO: 240 - RNA, 22 nt, Artificial sequence
  >hsa-miR-140-5p MIMAT0000431 Homo sapiens miR-140-5p
cagugguuuuacccuaugguag

SEQ ID NO: 241 - RNA, 22 nt, Artificial sequence
  >hsa-miR-141-3p MIMAT0000432 Homo sapiens miR-141-3p
uaacacugucugguaaagaugg

SEQ ID NO: 242 - RNA, 22 nt, Artificial sequence
  >hsa-miR-141-5p MIMAT0004598 Homo sapiens miR-141-5p
caucuuccaguacaguguugga

SEQ ID NO: 243 - RNA, 23 nt, Artificial sequence
  >hsa-miR-142-3p MIMAT0000434 Homo sapiens miR-142-3p
uguaguguuuccuacuuuaugga

SEQ ID NO: 244 - RNA, 21 nt, Artificial sequence
  >hsa-miR-142-5p MIMAT0000433 Homo sapiens miR-142-5p
cauaaaguagaaagcacuacu

SEQ ID NO: 245 - RNA, 21 nt, Artificial sequence
  >hsa-miR-143-3p MIMAT0000435 Homo sapiens miR-143-3p
ugagaugaagcacuguagcuc

SEQ ID NO: 246 - RNA, 22 nt, Artificial sequence
  >hsa-miR-143-5p MIMAT0004599 Homo sapiens miR-143-5p
ggugcagugcugcaucucuggu

SEQ ID NO: 247 - RNA, 20 nt, Artificial sequence
  >hsa-miR-144-3p MIMAT0000436 Homo sapiens miR-144-3p
uacaguauagaugauguacu

SEQ ID NO: 248 - RNA, 22 nt, Artificial sequence
  >hsa-miR-144-5p MIMAT0004600 Homo sapiens miR-144-5p
ggauaucaucauauacuguaag

SEQ ID NO: 249 - RNA, 22 nt, Artificial sequence
  >hsa-miR-145-3p MIMAT0004601 Homo sapiens miR-145-3p
ggauuccuggaaauacuguucu

SEQ ID NO: 250 - RNA, 23 nt, Artificial sequence
  >hsa-miR-145-5p MIMAT0000437 Homo sapiens miR-145-5p
guccaguuuucccaggaaucccu

SEQ ID NO: 251 - RNA, 22 nt, Artificial sequence
  >hsa-miR-1468-3p MIMAT0026638 Homo sapiens miR-1468-3p
agcaaaauaagcaaauggaaaa

SEQ ID NO: 252 - RNA, 21 nt, Artificial sequence
  >hsa-miR-1468-5p MIMAT0006789 Homo sapiens miR-1468-5p
cuccguuugccuguuucgcug

SEQ ID NO: 253 - RNA, 22 nt, Artificial sequence
  >hsa-miR-1469 MIMAT0007347 Homo sapiens miR-1469
cucggcgcggggcgcgggcucc

SEQ ID NO: 254 - RNA, 22 nt, Artificial sequence
  >hsa-miR-146a-3p MIMAT0004608 Homo sapiens miR-146a-3p
ccucugaaauucaguucuucag

SEQ ID NO: 255 - RNA, 22 nt, Artificial sequence
  >hsa-miR-146a-5p MIMAT0000449 Homo sapiens miR-146a-5p
ugagaacugaauuccauggguu

SEQ ID NO: 256 - RNA, 22 nt, Artificial sequence
  >hsa-miR-146b-3p MIMAT0004766 Homo sapiens miR-146b-3p
ugcccuguggacucaguucugg

SEQ ID NO: 257 - RNA, 22 nt, Artificial sequence
  >hsa-miR-146b-5p MIMAT0002809 Homo sapiens miR-146b-5p
ugagaacugaauuccauaggcu

SEQ ID NO: 258 - RNA, 21 nt, Artificial sequence
  >hsa-miR-1470 MIMAT0007348 Homo sapiens miR-1470
gcccuccgcccgugcaccccg

SEQ ID NO: 259 - RNA, 22 nt, Artificial sequence
  >hsa-miR-1471 MIMAT0007349 Homo sapiens miR-1471
gcccgcguguggagccaggugu

SEQ ID NO: 260 - RNA, 20 nt, Artificial sequence
  >hsa-miR-147a MIMAT0000251 Homo sapiens miR-147a
guguguggaaaugcuucugc

SEQ ID NO: 261 - RNA, 22 nt, Artificial sequence
  >hsa-miR-147b MIMAT0004928 Homo sapiens miR-147b
gugugcggaaaugcuucugcua

SEQ ID NO: 262 - RNA, 22 nt, Artificial sequence
  >hsa-miR-148a-3p MIMAT0000243 Homo sapiens miR-148a-3p
ucagugcacuacagaacuuugu

SEQ ID NO: 263 - RNA, 22 nt, Artificial sequence
  >hsa-miR-148a-5p MIMAT0004549 Homo sapiens miR-148a-5p
aaaguucugagacacuccgacu

SEQ ID NO: 264 - RNA, 22 nt, Artificial sequence
  >hsa-miR-148b-3p MIMAT0000759 Homo sapiens miR-148b-3p
ucagugcaucacagaacuuugu

SEQ ID NO: 265 - RNA, 22 nt, Artificial sequence
  >hsa-miR-148b-5p MIMAT0004699 Homo sapiens miR-148b-5p
aaguucuguuauacacucaggc

SEQ ID NO: 266 - RNA, 21 nt, Artificial sequence
  >hsa-miR-149-3p MIMAT0004609 Homo sapiens miR-149-3p
agggagggacgggggcugugc

SEQ ID NO: 267 - RNA, 23 nt, Artificial sequence
  >hsa-miR-149-5p MIMAT0000450 Homo sapiens miR-149-5p
ucuggcuccgugucuucacuccc

SEQ ID NO: 268 - RNA, 22 nt, Artificial sequence
  >hsa-miR-150-3p MIMAT0004610 Homo sapiens miR-150-3p
cugguacaggccugggggacag

SEQ ID NO: 269 - RNA, 22 nt, Artificial sequence
  >hsa-miR-150-5p MIMAT0000451 Homo sapiens miR-150-5p
ucucccaacccuuguaccagug

SEQ ID NO: 270 - RNA, 21 nt, Artificial sequence
  >hsa-miR-151a-3p MIMAT0000757 Homo sapiens miR-151a-3p
cuagacugaagcuccuugagg

SEQ ID NO: 271 - RNA, 21 nt, Artificial sequence
  >hsa-miR-151a-5p MIMAT0004697 Homo sapiens miR-151a-5p
ucgaggagcucacagucuagu

SEQ ID NO: 272 - RNA, 18 nt, Artificial sequence
  >hsa-miR-151b MIMAT0010214 Homo sapiens miR-151b
ucgaggagcucacagucu

SEQ ID NO: 273 - RNA, 21 nt, Artificial sequence
  >hsa-miR-152-3p MIMAT0000438 Homo sapiens miR-152-3p
ucagugcaugacagaacuugg

SEQ ID NO: 274 - RNA, 23 nt, Artificial sequence
  >hsa-miR-152-5p MIMAT0026479 Homo sapiens miR-152-5p
agguucugugauacacuccgacu

SEQ ID NO: 275 - RNA, 22 nt, Artificial sequence
  >hsa-miR-153-3p MIMAT0000439 Homo sapiens miR-153-3p
uugcauagucacaaaagugauc

SEQ ID NO: 276 - RNA, 22 nt, Artificial sequence
  >hsa-miR-153-5p MIMAT0026480 Homo sapiens miR-153-5p
ucauuuuugugauguugcagcu

SEQ ID NO: 277 - RNA, 22 nt, Artificial sequence
  >hsa-miR-1537-3p MIMAT0007399 Homo sapiens miR-1537-3p
aaaaccgucuaguuacaguugu

SEQ ID NO: 278 - RNA, 22 nt, Artificial sequence
  >hsa-miR-1537-5p MIMAT0026765 Homo sapiens miR-1537-5p
agcuguaauuagucaguuuucu

SEQ ID NO: 279 - RNA, 23 nt, Artificial sequence
  >hsa-miR-1538 MIMAT0007400 Homo sapiens miR-1538
cggcccgggcugcugcuguuccu

SEQ ID NO: 280 - RNA, 21 nt, Artificial sequence
  >hsa-miR-1539 MIMAT0007401 Homo sapiens miR-1539
uccugcgcgucccagaugccc

SEQ ID NO: 281 - RNA, 22 nt, Artificial sequence
  >hsa-miR-154-3p MIMAT0000453 Homo sapiens miR-154-3p
aaucauacacgguugaccuauu

SEQ ID NO: 282 - RNA, 22 nt, Artificial sequence
  >hsa-miR-154-5p MIMAT0000452 Homo sapiens miR-154-5p
uagguuauccguguugccuucg

SEQ ID NO: 283 - RNA, 22 nt, Artificial sequence
  >hsa-miR-155-3p MIMAT0004658 Homo sapiens miR-155-3p
cuccuacauauuagcauuaaca

SEQ ID NO: 284 - RNA, 23 nt, Artificial sequence
  >hsa-miR-155-5p MIMAT0000646 Homo sapiens miR-155-5p
uuaaugcuaaucgugauaggggu

SEQ ID NO: 285 - RNA, 20 nt, Artificial sequence
  >hsa-miR-1587 MIMAT0019077 Homo sapiens miR-1587
uugggcugggcuggguuggg

SEQ ID NO: 286 - RNA, 22 nt, Artificial sequence
  >hsa-miR-15a-3p MIMAT0004488 Homo sapiens miR-15a-3p
caggccauauugugcugccuca

SEQ ID NO: 287 - RNA, 22 nt, Artificial sequence
  >hsa-miR-15a-5p MIMAT0000068 Homo sapiens miR-15a-5p
uagcagcacauaaugguuugug

SEQ ID NO: 288 - RNA, 22 nt, Artificial sequence
  >hsa-miR-15b-3p MIMAT0004586 Homo sapiens miR-15b-3p
cgaaucauuauuugcugcucua

SEQ ID NO: 289 - RNA, 22 nt, Artificial sequence
  >hsa-miR-15b-5p MIMAT0000417 Homo sapiens miR-15b-5p
uagcagcacaucaugguuuaca

SEQ ID NO: 290 - RNA, 22 nt, Artificial sequence
  >hsa-miR-16-1-3p MIMAT0004489 Homo sapiens miR-16-1-3p
ccaguauuaacugugcugcuga

SEQ ID NO: 291 - RNA, 22 nt, Artificial sequence
  >hsa-miR-16-2-3p MIMAT0004518 Homo sapiens miR-16-2-3p
ccaauauuacugugcugcuuua

SEQ ID NO: 292 - RNA, 22 nt, Artificial sequence
  >hsa-miR-16-5p MIMAT0000069 Homo sapiens miR-16-5p
uagcagcacguaaauauuggcg

SEQ ID NO: 293 - RNA, 22 nt, Artificial sequence
  >hsa-miR-17-3p MIMAT0000071 Homo sapiens miR-17-3p
acugcagugaaggcacuuguag

SEQ ID NO: 294 - RNA, 23 nt, Artificial sequence
  >hsa-miR-17-5p MIMAT0000070 Homo sapiens miR-17-5p
caaagugcuuacagugcagguag

SEQ ID NO: 295 - RNA, 22 nt, Artificial sequence
  >hsa-miR-181a-2-3p MIMAT0004558 Homo sapiens miR-181a-2-3p
accacugaccguugacuguacc

SEQ ID NO: 296 - RNA, 22 nt, Artificial sequence
  >hsa-miR-181a-3p MIMAT0000270 Homo sapiens miR-181a-3p
accaucgaccguugauuguacc

SEQ ID NO: 297 - RNA, 23 nt, Artificial sequence
  >hsa-miR-181a-5p MIMAT0000256 Homo sapiens miR-181a-5p
aacauucaacgcugucggugagu

SEQ ID NO: 298 - RNA, 20 nt, Artificial sequence
  >hsa-miR-181b-2-3p MIMAT0031893 Homo sapiens miR-181b-2-3p
cucacugaucaaugaaugca

SEQ ID NO: 299 - RNA, 21 nt, Artificial sequence
  >hsa-miR-181b-3p MIMAT0022692 Homo sapiens miR-181b-3p
cucacugaacaaugaaugcaa

SEQ ID NO: 300 - RNA, 23 nt, Artificial sequence
  >hsa-miR-181b-5p MIMAT0000257 Homo sapiens miR-181b-5p
aacauucauugcugucggugggu

SEQ ID NO: 301 - RNA, 22 nt, Artificial sequence
  >hsa-miR-181c-3p MIMAT0004559 Homo sapiens miR-181c-3p
aaccaucgaccguugaguggac

SEQ ID NO: 302 - RNA, 22 nt, Artificial sequence
  >hsa-miR-181c-5p MIMAT0000258 Homo sapiens miR-181c-5p
aacauucaaccugucggugagu

SEQ ID NO: 303 - RNA, 21 nt, Artificial sequence
  >hsa-miR-181d-3p MIMAT0026608 Homo sapiens miR-181d-3p
ccaccgggggaugaaugucac

SEQ ID NO: 304 - RNA, 23 nt, Artificial sequence
  >hsa-miR-181d-5p MIMAT0002821 Homo sapiens miR-181d-5p
aacauucauuguugucggugggu

SEQ ID NO: 305 - RNA, 21 nt, Artificial sequence
  >hsa-miR-182-3p MIMAT0000260 Homo sapiens miR-182-3p
ugguucuagacuugccaacua

SEQ ID NO: 306 - RNA, 24 nt, Artificial sequence
  >hsa-miR-182-5p MIMAT0000259 Homo sapiens miR-182-5p
uuuggcaaugguagaacucacacu

SEQ ID NO: 307 - RNA, 18 nt, Artificial sequence
  >hsa-miR-1825 MIMAT0006765 Homo sapiens miR-1825
uccagugcccuccucucc

SEQ ID NO: 308 - RNA, 18 nt, Artificial sequence
  >hsa-miR-1827 MIMAT0006767 Homo sapiens miR-1827
ugaggcaguagauugaau

SEQ ID NO: 309 - RNA, 22 nt, Artificial sequence
  >hsa-miR-183-3p MIMAT0004560 Homo sapiens miR-183-3p
gugaauuaccgaagggccauaa

SEQ ID NO: 310 - RNA, 22 nt, Artificial sequence
  >hsa-miR-183-5p MIMAT0000261 Homo sapiens miR-183-5p
uauggcacugguagaauucacu

SEQ ID NO: 311 - RNA, 22 nt, Artificial sequence
  >hsa-miR-184 MIMAT0000454 Homo sapiens miR-184
uggacggagaacugauaagggu

SEQ ID NO: 312 - RNA, 22 nt, Artificial sequence
  >hsa-miR-185-3p MIMAT0004611 Homo sapiens miR-185-3p
aggggcuggcuuuccucugguc

SEQ ID NO: 313 - RNA, 22 nt, Artificial sequence
  >hsa-miR-185-5p MIMAT0000455 Homo sapiens miR-185-5p
uggagagaaaggcaguuccuga

SEQ ID NO: 314 - RNA, 22 nt, Artificial sequence
  >hsa-miR-186-3p MIMAT0004612 Homo sapiens miR-186-3p
gcccaaaggugaauuuuuuggg

SEQ ID NO: 315 - RNA, 22 nt, Artificial sequence
  >hsa-miR-186-5p MIMAT0000456 Homo sapiens miR-186-5p
caaagaauucuccuuuugggcu

SEQ ID NO: 316 - RNA, 22 nt, Artificial sequence
  >hsa-miR-187-3p MIMAT0000262 Homo sapiens miR-187-3p
ucgugucuuguguugcagccgg

SEQ ID NO: 317 - RNA, 22 nt, Artificial sequence
  >hsa-miR-187-5p MIMAT0004561 Homo sapiens miR-187-5p
ggcuacaacacaggacccgggc

SEQ ID NO: 318 - RNA, 21 nt, Artificial sequence
  >hsa-miR-188-3p MIMAT0004613 Homo sapiens miR-188-3p
cucccacaugcaggguuugca

SEQ ID NO: 319 - RNA, 21 nt, Artificial sequence
  >hsa-miR-188-5p MIMAT0000457 Homo sapiens miR-188-5p
caucccuugcaugguggaggg

SEQ ID NO: 320 - RNA, 23 nt, Artificial sequence
  >hsa-miR-18a-3p MIMAT0002891 Homo sapiens miR-18a-3p
acugcccuaagugcuccuucugg

SEQ ID NO: 321 - RNA, 23 nt, Artificial sequence
  >hsa-miR-18a-5p MIMAT0000072 Homo sapiens miR-18a-5p
uaaggugcaucuagugcagauag

SEQ ID NO: 322 - RNA, 22 nt, Artificial sequence
  >hsa-miR-18b-3p MIMAT0004751 Homo sapiens miR-18b-3p
ugcccuaaaugccccuucuggc

SEQ ID NO: 323 - RNA, 23 nt, Artificial sequence
  >hsa-miR-18b-5p MIMAT0001412 Homo sapiens miR-18b-5p
uaaggugcaucuagugcaguuag

SEQ ID NO: 324 - RNA, 21 nt, Artificial sequence
  >hsa-miR-1908-3p MIMAT0026916 Homo sapiens miR-1908-3p
ccggccgccggcuccgccccg

SEQ ID NO: 325 - RNA, 21 nt, Artificial sequence
  >hsa-miR-1908-5p MIMAT0007881 Homo sapiens miR-1908-5p
cggcggggacggcgauugguc

SEQ ID NO: 326 - RNA, 22 nt, Artificial sequence
  >hsa-miR-1909-3p MIMAT0007883 Homo sapiens miR-1909-3p
cgcaggggccgggugcucaccg

SEQ ID NO: 327 - RNA, 21 nt, Artificial sequence
  >hsa-miR-1909-5p MIMAT0007882 Homo sapiens miR-1909-5p
ugagugccggugccugcccug

SEQ ID NO: 328 - RNA, 21 nt, Artificial sequence
  >hsa-miR-190a-3p MIMAT0026482 Homo sapiens miR-190a-3p
cuauauaucaaacauauuccu

SEQ ID NO: 329 - RNA, 22 nt, Artificial sequence
  >hsa-miR-190a-5p MIMAT0000458 Homo sapiens miR-190a-5p
ugauauguuugauauauuaggu

SEQ ID NO: 330 - RNA, 21 nt, Artificial sequence
  >hsa-miR-190b MIMAT0004929 Homo sapiens miR-190b
ugauauguuugauauuggguu

SEQ ID NO: 331 - RNA, 22 nt, Artificial sequence
  >hsa-miR-191-3p MIMAT0001618 Homo sapiens miR-191-3p
gcugcgcuuggauuucgucccc

SEQ ID NO: 332 - RNA, 23 nt, Artificial sequence
  >hsa-miR-191-5p MIMAT0000440 Homo sapiens miR-191-5p
caacggaaucccaaaagcagcug

SEQ ID NO: 333 - RNA, 20 nt, Artificial sequence
  >hsa-miR-1910-3p MIMAT0026917 Homo sapiens miR-1910-3p
gaggcagaagcaggaugaca

SEQ ID NO: 334 - RNA, 21 nt, Artificial sequence
  >hsa-miR-1910-5p MIMAT0007884 Homo sapiens miR-1910-5p
ccaguccugugccugccgccu

SEQ ID NO: 335 - RNA, 20 nt, Artificial sequence
  >hsa-miR-1911-3p MIMAT0007886 Homo sapiens miR-1911-3p
caccaggcauuguggucucc

SEQ ID NO: 336 - RNA, 23 nt, Artificial sequence
  >hsa-miR-1911-5p MIMAT0007885 Homo sapiens miR-1911-5p
ugaguaccgccaugucuguuggg

SEQ ID NO: 337 - RNA, 22 nt, Artificial sequence
  >hsa-miR-1912 MIMAT0007887 Homo sapiens miR-1912
uacccagagcaugcagugugaa

SEQ ID NO: 338 - RNA, 22 nt, Artificial sequence
  >hsa-miR-1913 MIMAT0007888 Homo sapiens miR-1913
ucugcccccuccgcugcugcca

SEQ ID NO: 339 - RNA, 22 nt, Artificial sequence
  >hsa-miR-1914-3p MIMAT0007890 Homo sapiens miR-1914-3p
ggaggggucccgcacugggagg

SEQ ID NO: 340 - RNA, 22 nt, Artificial sequence
  >hsa-miR-1914-5p MIMAT0007889 Homo sapiens miR-1914-5p
cccugugcccggcccacuucug

SEQ ID NO: 341 - RNA, 20 nt, Artificial sequence
  >hsa-miR-1915-3p MIMAT0007892 Homo sapiens miR-1915-3p
ccccagggcgacgcggcggg

SEQ ID NO: 342 - RNA, 22 nt, Artificial sequence
  >hsa-miR-1915-5p MIMAT0007891 Homo sapiens miR-1915-5p
accuugccuugcugcccgggcc

SEQ ID NO: 343 - RNA, 22 nt, Artificial sequence
  >hsa-miR-192-3p MIMAT0004543 Homo sapiens miR-192-3p
cugccaauuccauaggucacag

SEQ ID NO: 344 - RNA, 21 nt, Artificial sequence
  >hsa-miR-192-5p MIMAT0000222 Homo sapiens miR-192-5p
cugaccuaugaauugacagcc

SEQ ID NO: 345 - RNA, 22 nt, Artificial sequence
  >hsa-miR-193a-3p MIMAT0000459 Homo sapiens miR-193a-3p
aacuggccuacaaagucccagu

SEQ ID NO: 346 - RNA, 22 nt, Artificial sequence
  >hsa-miR-193a-5p MIMAT0004614 Homo sapiens miR-193a-5p
ugggucuuugcgggcgagauga

SEQ ID NO: 347 - RNA, 22 nt, Artificial sequence
  >hsa-miR-193b-3p MIMAT0002819 Homo sapiens miR-193b-3p
aacuggcccucaaagucccgcu

SEQ ID NO: 348 - RNA, 22 nt, Artificial sequence
  >hsa-miR-193b-5p MIMAT0004767 Homo sapiens miR-193b-5p
cgggguuuugagggcgagauga

SEQ ID NO: 349 - RNA, 22 nt, Artificial sequence
  >hsa-miR-194-3p MIMAT0004671 Homo sapiens miR-194-3p
ccaguggggcugcuguuaucug

SEQ ID NO: 350 - RNA, 22 nt, Artificial sequence
  >hsa-miR-194-5p MIMAT0000460 Homo sapiens miR-194-5p
uguaacagcaacuccaugugga

SEQ ID NO: 351 - RNA, 22 nt, Artificial sequence
  >hsa-miR-195-3p MIMAT0004615 Homo sapiens miR-195-3p
ccaauauuggcugugcugcucc

SEQ ID NO: 352 - RNA, 21 nt, Artificial sequence
  >hsa-miR-195-5p MIMAT0000461 Homo sapiens miR-195-5p
uagcagcacagaaauauuggc

SEQ ID NO: 353 - RNA, 22 nt, Artificial sequence
  >hsa-miR-196a-3p MIMAT0004562 Homo sapiens miR-196a-3p
cggcaacaagaaacugccugag

SEQ ID NO: 354 - RNA, 22 nt, Artificial sequence
  >hsa-miR-196a-5p MIMAT0000226 Homo sapiens miR-196a-5p
uagguaguuucauguuguuggg

SEQ ID NO: 355 - RNA, 22 nt, Artificial sequence
  >hsa-miR-196b-3p MIMAT0009201 Homo sapiens miR-196b-3p
ucgacagcacgacacugccuuc

SEQ ID NO: 356 - RNA, 22 nt, Artificial sequence
  >hsa-miR-196b-5p MIMAT0001080 Homo sapiens miR-196b-5p
uagguaguuuccuguuguuggg

SEQ ID NO: 357 - RNA, 22 nt, Artificial sequence
  >hsa-miR-197-3p MIMAT0000227 Homo sapiens miR-197-3p
uucaccaccuucuccacccagc

SEQ ID NO: 358 - RNA, 23 nt, Artificial sequence
  >hsa-miR-197-5p MIMAT0022691 Homo sapiens miR-197-5p
cggguagagagggcagugggagg

SEQ ID NO: 359 - RNA, 22 nt, Artificial sequence
  >hsa-miR-1972 MIMAT0009447 Homo sapiens miR-1972
ucaggccaggcacaguggcuca

SEQ ID NO: 360 - RNA, 19 nt, Artificial sequence
  >hsa-miR-1973 MIMAT0009448 Homo sapiens miR-1973
accgugcaaagguagcaua

SEQ ID NO: 361 - RNA, 20 nt, Artificial sequence
  >hsa-miR-1976 MIMAT0009451 Homo sapiens miR-1976
ccuccugcccuccuugcugu

SEQ ID NO: 362 - RNA, 22 nt, Artificial sequence
  >hsa-miR-198 MIMAT0000228 Homo sapiens miR-198
gguccagaggggagauagguuc

SEQ ID NO: 363 - RNA, 22 nt, Artificial sequence
  >hsa-miR-199a-3p MIMAT0000232 Homo sapiens miR-199a-3p
acaguagucugcacauugguua

SEQ ID NO: 364 - RNA, 23 nt, Artificial sequence
  >hsa-miR-199a-5p MIMAT0000231 Homo sapiens miR-199a-5p
cccaguguucagacuaccuguuc

SEQ ID NO: 365 - RNA, 22 nt, Artificial sequence
  >hsa-miR-199b-3p MIMAT0004563 Homo sapiens miR-199b-3p
acaguagucugcacauugguua

SEQ ID NO: 366 - RNA, 23 nt, Artificial sequence
  >hsa-miR-199b-5p MIMAT0000263 Homo sapiens miR-199b-5p
cccaguguuuagacuaucuguuc

SEQ ID NO: 367 - RNA, 23 nt, Artificial sequence
  >hsa-miR-19a-3p MIMAT0000073 Homo sapiens miR-19a-3p
ugugcaaaucuaugcaaaacuga

SEQ ID NO: 368 - RNA, 22 nt, Artificial sequence
  >hsa-miR-19a-5p MIMAT0004490 Homo sapiens miR-19a-5p
aguuuugcauaguugcacuaca

SEQ ID NO: 369 - RNA, 23 nt, Artificial sequence
  >hsa-miR-19b-1-5p MIMAT0004491 Homo sapiens miR-19b-1-5p
aguuuugcagguuugcauccagc

SEQ ID NO: 370 - RNA, 22 nt, Artificial sequence
  >hsa-miR-19b-2-5p MIMAT0004492 Homo sapiens miR-19b-2-5p
aguuuugcagguuugcauuuca

SEQ ID NO: 371 - RNA, 23 nt, Artificial sequence
  >hsa-miR-19b-3p MIMAT0000074 Homo sapiens miR-19b-3p
ugugcaaauccaugcaaaacuga

SEQ ID NO: 372 - RNA, 22 nt, Artificial sequence
  >hsa-miR-200a-3p MIMAT0000682 Homo sapiens miR-200a-3p
uaacacugucugguaacgaugu

SEQ ID NO: 373 - RNA, 22 nt, Artificial sequence
  >hsa-miR-200a-5p MIMAT0001620 Homo sapiens miR-200a-5p
caucuuaccggacagugcugga

SEQ ID NO: 374 - RNA, 22 nt, Artificial sequence
  >hsa-miR-200b-3p MIMAT0000318 Homo sapiens miR-200b-3p
uaauacugccugguaaugauga

SEQ ID NO: 375 - RNA, 22 nt, Artificial sequence
  >hsa-miR-200b-5p MIMAT0004571 Homo sapiens miR-200b-5p
caucuuacugggcagcauugga

SEQ ID NO: 376 - RNA, 23 nt, Artificial sequence
  >hsa-miR-200c-3p MIMAT0000617 Homo sapiens miR-200c-3p
uaauacugccggguaaugaugga

SEQ ID NO: 377 - RNA, 22 nt, Artificial sequence
  >hsa-miR-200c-5p MIMAT0004657 Homo sapiens miR-200c-5p
cgucuuacccagcaguguuugg

SEQ ID NO: 378 - RNA, 20 nt, Artificial sequence
  >hsa-miR-202-3p MIMAT0002811 Homo sapiens miR-202-3p
agagguauagggcaugggaa

SEQ ID NO: 379 - RNA, 22 nt, Artificial sequence
  >hsa-miR-202-5p MIMAT0002810 Homo sapiens miR-202-5p
uuccuaugcauauacuucuuug

SEQ ID NO: 380 - RNA, 22 nt, Artificial sequence
  >hsa-miR-203a-3p MIMAT0000264 Homo sapiens miR-203a-3p
gugaaauguuuaggaccacuag

SEQ ID NO: 381 - RNA, 25 nt, Artificial sequence
  >hsa-miR-203a-5p MIMAT0031890 Homo sapiens miR-203a-5p
agugguucuuaacaguucaacaguu

SEQ ID NO: 382 - RNA, 23 nt, Artificial sequence
  >hsa-miR-203b-3p MIMAT0019814 Homo sapiens miR-203b-3p
uugaacuguuaagaaccacugga

SEQ ID NO: 383 - RNA, 22 nt, Artificial sequence
  >hsa-miR-203b-5p MIMAT0019813 Homo sapiens miR-203b-5p
uagugguccuaaacauuucaca

SEQ ID NO: 384 - RNA, 21 nt, Artificial sequence
  >hsa-miR-204-3p MIMAT0022693 Homo sapiens miR-204-3p
gcugggaaggcaaagggacgu

SEQ ID NO: 385 - RNA, 22 nt, Artificial sequence
  >hsa-miR-204-5p MIMAT0000265 Homo sapiens miR-204-5p
uucccuuugucauccuaugccu

SEQ ID NO: 386 - RNA, 21 nt, Artificial sequence
  >hsa-miR-205-3p MIMAT0009197 Homo sapiens miR-205-3p
gauuucaguggagugaaguuc

SEQ ID NO: 387 - RNA, 22 nt, Artificial sequence
  >hsa-miR-205-5p MIMAT0000266 Homo sapiens miR-205-5p
uccuucauuccaccggagucug

SEQ ID NO: 388 - RNA, 20 nt, Artificial sequence
  >hsa-miR-2052 MIMAT0009977 Homo sapiens miR-2052
uguuuugauaacaguaaugu

SEQ ID NO: 389 - RNA, 23 nt, Artificial sequence
  >hsa-miR-2053 MIMAT0009978 Homo sapiens miR-2053
guguuaauuaaaccucuauuuac

SEQ ID NO: 390 - RNA, 23 nt, Artificial sequence
  >hsa-miR-2054 MIMAT0009979 Homo sapiens miR-2054
cuguaauauaaauuuaauuuauu

SEQ ID NO: 391 - RNA, 22 nt, Artificial sequence
  >hsa-miR-206 MIMAT0000462 Homo sapiens miR-206
uggaauguaaggaagugugugg

SEQ ID NO: 392 - RNA, 22 nt, Artificial sequence
  >hsa-miR-208a-3p MIMAT0000241 Homo sapiens miR-208a-3p
auaagacgagcaaaaagcuugu

SEQ ID NO: 393 - RNA, 22 nt, Artificial sequence
  >hsa-miR-208a-5p MIMAT0026474 Homo sapiens miR-208a-5p
gagcuuuuggcccggguuauac

SEQ ID NO: 394 - RNA, 22 nt, Artificial sequence
  >hsa-miR-208b-3p MIMAT0004960 Homo sapiens miR-208b-3p
auaagacgaacaaaagguuugu

SEQ ID NO: 395 - RNA, 22 nt, Artificial sequence
  >hsa-miR-208b-5p MIMAT0026722 Homo sapiens miR-208b-5p
aagcuuuuugcucgaauuaugu

SEQ ID NO: 396 - RNA, 22 nt, Artificial sequence
  >hsa-miR-20a-3p MIMAT0004493 Homo sapiens miR-20a-3p
acugcauuaugagcacuuaaag

SEQ ID NO: 397 - RNA, 23 nt, Artificial sequence
  >hsa-miR-20a-5p MIMAT0000075 Homo sapiens miR-20a-5p
uaaagugcuuauagugcagguag

SEQ ID NO: 398 - RNA, 22 nt, Artificial sequence
  >hsa-miR-20b-3p MIMAT0004752 Homo sapiens miR-20b-3p
acuguaguaugggcacuuccag

SEQ ID NO: 399 - RNA, 23 nt, Artificial sequence
  >hsa-miR-20b-5p MIMAT0001413 Homo sapiens miR-20b-5p
caaagugcucauagugcagguag

SEQ ID NO: 400 - RNA, 21 nt, Artificial sequence
  >hsa-miR-21-3p MIMAT0004494 Homo sapiens miR-21-3p
caacaccagucgaugggcugu

SEQ ID NO: 401 - RNA, 22 nt, Artificial sequence
  >hsa-miR-21-5p MIMAT0000076 Homo sapiens miR-21-5p
uagcuuaucagacugauguuga

SEQ ID NO: 402 - RNA, 22 nt, Artificial sequence
  >hsa-miR-210-3p MIMAT0000267 Homo sapiens miR-210-3p
cugugcgugugacagcggcuga

SEQ ID NO: 403 - RNA, 22 nt, Artificial sequence
  >hsa-miR-210-5p MIMAT0026475 Homo sapiens miR-210-5p
agccccugcccaccgcacacug

SEQ ID NO: 404 - RNA, 21 nt, Artificial sequence
  >hsa-miR-211-3p MIMAT0022694 Homo sapiens miR-211-3p
gcagggacagcaaaggggugc

SEQ ID NO: 405 - RNA, 22 nt, Artificial sequence
  >hsa-miR-211-5p MIMAT0000268 Homo sapiens miR-211-5p
uucccuuugucauccuucgccu

SEQ ID NO: 406 - RNA, 22 nt, Artificial sequence
  >hsa-miR-2110 MIMAT0010133 Homo sapiens miR-2110
uuggggaaacggccgcugagug

SEQ ID NO: 407 - RNA, 21 nt, Artificial sequence
  >hsa-miR-2113 MIMAT0009206 Homo sapiens miR-2113
auuugugcuuggcucugucac

SEQ ID NO: 408 - RNA, 21 nt, Artificial sequence
  >hsa-miR-2114-3p MIMAT0011157 Homo sapiens miR-2114-3p
cgagccucaagcaagggacuu

SEQ ID NO: 409 - RNA, 22 nt, Artificial sequence
  >hsa-miR-2114-5p MIMAT0011156 Homo sapiens miR-2114-5p
uagucccuuccuugaagcgguc

SEQ ID NO: 410 - RNA, 22 nt, Artificial sequence
  >hsa-miR-2115-3p MIMAT0011159 Homo sapiens miR-2115-3p
caucagaauucauggaggcuag

SEQ ID NO: 411 - RNA, 22 nt, Artificial sequence
  >hsa-miR-2115-5p MIMAT0011158 Homo sapiens miR-2115-5p
agcuuccaugacuccugaugga

SEQ ID NO: 412 - RNA, 21 nt, Artificial sequence
  >hsa-miR-2116-3p MIMAT0011161 Homo sapiens miR-2116-3p
ccucccaugccaagaacuccc

SEQ ID NO: 413 - RNA, 21 nt, Artificial sequence
  >hsa-miR-2116-5p MIMAT0011160 Homo sapiens miR-2116-5p
gguucuuagcauaggaggucu

SEQ ID NO: 414 - RNA, 21 nt, Artificial sequence
  >hsa-miR-2117 MIMAT0011162 Homo sapiens miR-2117
uguucucuuugccaaggacag

SEQ ID NO: 415 - RNA, 21 nt, Artificial sequence
  >hsa-miR-212-3p MIMAT0000269 Homo sapiens miR-212-3p
uaacagucuccagucacggcc

SEQ ID NO: 416 - RNA, 23 nt, Artificial sequence
  >hsa-miR-212-5p MIMAT0022695 Homo sapiens miR-212-5p
accuuggcucuagacugcuuacu

SEQ ID NO: 417 - RNA, 22 nt, Artificial sequence
  >hsa-miR-214-3p MIMAT0000271 Homo sapiens miR-214-3p
acagcaggcacagacaggcagu

SEQ ID NO: 418 - RNA, 22 nt, Artificial sequence
  >hsa-miR-214-5p MIMAT0004564 Homo sapiens miR-214-5p
ugccugucuacacuugcugugc

SEQ ID NO: 419 - RNA, 23 nt, Artificial sequence
  >hsa-miR-215-3p MIMAT0026476 Homo sapiens miR-215-3p
ucugucauuucuuuaggccaaua

SEQ ID NO: 420 - RNA, 21 nt, Artificial sequence
  >hsa-miR-215-5p MIMAT0000272 Homo sapiens miR-215-5p
augaccuaugaauugacagac

SEQ ID NO: 421 - RNA, 22 nt, Artificial sequence
  >hsa-miR-216a-3p MIMAT0022844 Homo sapiens miR-216a-3p
ucacaguggucucugggauuau

SEQ ID NO: 422 - RNA, 22 nt, Artificial sequence
  >hsa-miR-216a-5p MIMAT0000273 Homo sapiens miR-216a-5p
uaaucucagcuggcaacuguga

SEQ ID NO: 423 - RNA, 24 nt, Artificial sequence
  >hsa-miR-216b-3p MIMAT0026721 Homo sapiens miR-216b-3p
acacacuuacccguagagauucua

SEQ ID NO: 424 - RNA, 22 nt, Artificial sequence
  >hsa-miR-216b-5p MIMAT0004959 Homo sapiens miR-216b-5p
aaaucucugcaggcaaauguga

SEQ ID NO: 425 - RNA, 23 nt, Artificial sequence
  >hsa-miR-217 MIMAT0000274 Homo sapiens miR-217
uacugcaucaggaacugauugga

SEQ ID NO: 426 - RNA, 22 nt, Artificial sequence
  >hsa-miR-218-1-3p MIMAT0004565 Homo sapiens miR-218-1-3p
augguuccgucaagcaccaugg

SEQ ID NO: 427 - RNA, 22 nt, Artificial sequence
  >hsa-miR-218-2-3p MIMAT0004566 Homo sapiens miR-218-2-3p
caugguucugucaagcaccgcg

SEQ ID NO: 428 - RNA, 21 nt, Artificial sequence
  >hsa-miR-218-5p MIMAT0000275 Homo sapiens miR-218-5p
uugugcuugaucuaaccaugu

SEQ ID NO: 429 - RNA, 22 nt, Artificial sequence
  >hsa-miR-219a-1-3p MIMAT0004567 Homo sapiens miR-219a-1-3p
agaguugagucuggacgucccg

SEQ ID NO: 430 - RNA, 22 nt, Artificial sequence
  >hsa-miR-219a-2-3p MIMAT0004675 Homo sapiens miR-219a-2-3p
agaauuguggcuggacaucugu

SEQ ID NO: 431 - RNA, 21 nt, Artificial sequence
  >hsa-miR-219a-5p MIMAT0000276 Homo sapiens miR-219a-5p
ugauuguccaaacgcaauucu

SEQ ID NO: 432 - RNA, 23 nt, Artificial sequence
  >hsa-miR-219b-3p MIMAT0019748 Homo sapiens miR-219b-3p
agaauugcguuuggacaaucagu

SEQ ID NO: 433 - RNA, 22 nt, Artificial sequence
  >hsa-miR-219b-5p MIMAT0019747 Homo sapiens miR-219b-5p
agauguccagccacaauucucg

SEQ ID NO: 434 - RNA, 22 nt, Artificial sequence
  >hsa-miR-22-3p MIMAT0000077 Homo sapiens miR-22-3p
aagcugccaguugaagaacugu

SEQ ID NO: 435 - RNA, 22 nt, Artificial sequence
  >hsa-miR-22-5p MIMAT0004495 Homo sapiens miR-22-5p
aguucuucaguggcaagcuuua

SEQ ID NO: 436 - RNA, 23 nt, Artificial sequence
  >hsa-miR-221-3p MIMAT0000278 Homo sapiens miR-221-3p
agcuacauugucugcuggguuuc

SEQ ID NO: 437 - RNA, 22 nt, Artificial sequence
  >hsa-miR-221-5p MIMAT0004568 Homo sapiens miR-221-5p
accuggcauacaauguagauuu

SEQ ID NO: 438 - RNA, 21 nt, Artificial sequence
  >hsa-miR-222-3p MIMAT0000279 Homo sapiens miR-222-3p
agcuacaucuggcuacugggu

SEQ ID NO: 439 - RNA, 22 nt, Artificial sequence
  >hsa-miR-222-5p MIMAT0004569 Homo sapiens miR-222-5p
cucaguagccaguguagauccu

SEQ ID NO: 440 - RNA, 22 nt, Artificial sequence
  >hsa-miR-223-3p MIMAT0000280 Homo sapiens miR-223-3p
ugucaguuugucaaauacccca

SEQ ID NO: 441 - RNA, 22 nt, Artificial sequence
  >hsa-miR-223-5p MIMAT0004570 Homo sapiens miR-223-5p
cguguauuugacaagcugaguu

SEQ ID NO: 442 - RNA, 23 nt, Artificial sequence
  >hsa-miR-224-3p MIMAT0009198 Homo sapiens miR-224-3p
aaaauggugcccuagugacuaca

SEQ ID NO: 443 - RNA, 21 nt, Artificial sequence
  >hsa-miR-224-5p MIMAT0000281 Homo sapiens miR-224-5p
caagucacuagugguuccguu

SEQ ID NO: 444 - RNA, 22 nt, Artificial sequence
  >hsa-miR-2276-3p MIMAT0011775 Homo sapiens miR-2276-3p
ucugcaagugucagaggcgagg

SEQ ID NO: 445 - RNA, 22 nt, Artificial sequence
  >hsa-miR-2276-5p MIMAT0026921 Homo sapiens miR-2276-5p
gcccucugucaccuugcagacg

SEQ ID NO: 446 - RNA, 21 nt, Artificial sequence
  >hsa-miR-2277-3p MIMAT0011777 Homo sapiens miR-2277-3p
ugacagcgcccugccuggcuc

SEQ ID NO: 447 - RNA, 24 nt, Artificial sequence
  >hsa-miR-2277-5p MIMAT0017352 Homo sapiens miR-2277-5p
agcgcgggcugagcgcugccaguc

SEQ ID NO: 448 - RNA, 22 nt, Artificial sequence
  >hsa-miR-2278 MIMAT0011778 Homo sapiens miR-2278
gagagcaguguguguugccugg

SEQ ID NO: 449 - RNA, 22 nt, Artificial sequence
  >hsa-miR-2355-3p MIMAT0017950 Homo sapiens miR-2355-3p
auuguccuugcuguuuggagau

SEQ ID NO: 450 - RNA, 21 nt, Artificial sequence
  >hsa-miR-2355-5p MIMAT0016895 Homo sapiens miR-2355-5p
auccccagauacaauggacaa

SEQ ID NO: 451 - RNA, 20 nt, Artificial sequence
  >hsa-miR-2392 MIMAT0019043 Homo sapiens miR-2392
uaggaugggggugagaggug

SEQ ID NO: 452 - RNA, 21 nt, Artificial sequence
  >hsa-miR-23a-3p MIMAT0000078 Homo sapiens miR-23a-3p
aucacauugccagggauuucc

SEQ ID NO: 453 - RNA, 22 nt, Artificial sequence
  >hsa-miR-23a-5p MIMAT0004496 Homo sapiens miR-23a-5p
gggguuccuggggaugggauuu

SEQ ID NO: 454 - RNA, 21 nt, Artificial sequence
  >hsa-miR-23b-3p MIMAT0000418 Homo sapiens miR-23b-3p
aucacauugccagggauuacc

SEQ ID NO: 455 - RNA, 22 nt, Artificial sequence
  >hsa-miR-23b-5p MIMAT0004587 Homo sapiens miR-23b-5p
uggguuccuggcaugcugauuu

SEQ ID NO: 456 - RNA, 22 nt, Artificial sequence
  >hsa-miR-23c MIMAT0018000 Homo sapiens miR-23c
aucacauugccagugauuaccc

SEQ ID NO: 457 - RNA, 22 nt, Artificial sequence
  >hsa-miR-24-1-5p MIMAT0000079 Homo sapiens miR-24-1-5p
ugccuacugagcugauaucagu

SEQ ID NO: 458 - RNA, 22 nt, Artificial sequence
  >hsa-miR-24-2-5p MIMAT0004497 Homo sapiens miR-24-2-5p
ugccuacugagcugaaacacag

SEQ ID NO: 459 - RNA, 22 nt, Artificial sequence
  >hsa-miR-24-3p MIMAT0000080 Homo sapiens miR-24-3p
uggcucaguucagcaggaacag

SEQ ID NO: 460 - RNA, 22 nt, Artificial sequence
  >hsa-miR-2467-3p MIMAT0019953 Homo sapiens miR-2467-3p
agcagaggcagagaggcucagg

SEQ ID NO: 461 - RNA, 23 nt, Artificial sequence
  >hsa-miR-2467-5p MIMAT0019952 Homo sapiens miR-2467-5p
ugaggcucuguuagccuuggcuc

SEQ ID NO: 462 - RNA, 22 nt, Artificial sequence
  >hsa-miR-25-3p MIMAT0000081 Homo sapiens miR-25-3p
cauugcacuugucucggucuga

SEQ ID NO: 463 - RNA, 21 nt, Artificial sequence
  >hsa-miR-25-5p MIMAT0004498 Homo sapiens miR-25-5p
aggcggagacuugggcaauug

SEQ ID NO: 464 - RNA, 22 nt, Artificial sequence
  >hsa-miR-2681-3p MIMAT0013516 Homo sapiens miR-2681-3p
uaucauggaguugguaaagcac

SEQ ID NO: 465 - RNA, 22 nt, Artificial sequence
  >hsa-miR-2681-5p MIMAT0013515 Homo sapiens miR-2681-5p
guuuuaccaccuccaggagacu

SEQ ID NO: 466 - RNA, 22 nt, Artificial sequence
  >hsa-miR-2682-3p MIMAT0013518 Homo sapiens miR-2682-3p
cgccucuucagcgcugucuucc

SEQ ID NO: 467 - RNA, 23 nt, Artificial sequence
  >hsa-miR-2682-5p MIMAT0013517 Homo sapiens miR-2682-5p
caggcagugacuguucagacguc

SEQ ID NO: 468 - RNA, 22 nt, Artificial sequence
  >hsa-miR-26a-1-3p MIMAT0004499 Homo sapiens miR-26a-1-3p
ccuauucuugguuacuugcacg

SEQ ID NO: 469 - RNA, 22 nt, Artificial sequence
  >hsa-miR-26a-2-3p MIMAT0004681 Homo sapiens miR-26a-2-3p
ccuauucuugauuacuuguuuc

SEQ ID NO: 470 - RNA, 22 nt, Artificial sequence
  >hsa-miR-26a-5p MIMAT0000082 Homo sapiens miR-26a-5p
uucaaguaauccaggauaggcu

SEQ ID NO: 471 - RNA, 22 nt, Artificial sequence
  >hsa-miR-26b-3p MIMAT0004500 Homo sapiens miR-26b-3p
ccuguucuccauuacuuggcuc

SEQ ID NO: 472 - RNA, 21 nt, Artificial sequence
  >hsa-miR-26b-5p MIMAT0000083 Homo sapiens miR-26b-5p
uucaaguaauucaggauaggu

SEQ ID NO: 473 - RNA, 21 nt, Artificial sequence
  >hsa-miR-27a-3p MIMAT0000084 Homo sapiens miR-27a-3p
uucacaguggcuaaguuccgc

SEQ ID NO: 474 - RNA, 22 nt, Artificial sequence
  >hsa-miR-27a-5p MIMAT0004501 Homo sapiens miR-27a-5p
agggcuuagcugcuugugagca

SEQ ID NO: 475 - RNA, 21 nt, Artificial sequence
  >hsa-miR-27b-3p MIMAT0000419 Homo sapiens miR-27b-3p
uucacaguggcuaaguucugc

SEQ ID NO: 476 - RNA, 22 nt, Artificial sequence
  >hsa-miR-27b-5p MIMAT0004588 Homo sapiens miR-27b-5p
agagcuuagcugauuggugaac

SEQ ID NO: 477 - RNA, 22 nt, Artificial sequence
  >hsa-miR-28-3p MIMAT0004502 Homo sapiens miR-28-3p
cacuagauugugagcuccugga

SEQ ID NO: 478 - RNA, 22 nt, Artificial sequence
  >hsa-miR-28-5p MIMAT0000085 Homo sapiens miR-28-5p
aaggagcucacagucuauugag

SEQ ID NO: 479 - RNA, 19 nt, Artificial sequence
  >hsa-miR-2861 MIMAT0013802 Homo sapiens miR-2861
ggggccuggcggugggcgg

SEQ ID NO: 480 - RNA, 21 nt, Artificial sequence
  >hsa-miR-2909 MIMAT0013863 Homo sapiens miR-2909
guuagggccaacaucucuugg

SEQ ID NO: 481 - RNA, 22 nt, Artificial sequence
  >hsa-miR-296-3p MIMAT0004679 Homo sapiens miR-296-3p
gaggguuggguggaggcucucc

SEQ ID NO: 482 - RNA, 21 nt, Artificial sequence
  >hsa-miR-296-5p MIMAT0000690 Homo sapiens miR-296-5p
agggcccccccucaauccugu

SEQ ID NO: 483 - RNA, 21 nt, Artificial sequence
  >hsa-miR-297 MIMAT0004450 Homo sapiens miR-297
auguaugugugcaugugcaug

SEQ ID NO: 484 - RNA, 24 nt, Artificial sequence
  >hsa-miR-298 MIMAT0004901 Homo sapiens miR-298
agcagaagcagggagguucuccca

SEQ ID NO: 485 - RNA, 22 nt, Artificial sequence
  >hsa-miR-299-3p MIMAT0000687 Homo sapiens miR-299-3p
uaugugggaugguaaaccgcuu

SEQ ID NO: 486 - RNA, 22 nt, Artificial sequence
  >hsa-miR-299-5p MIMAT0002890 Homo sapiens miR-299-5p
ugguuuaccgucccacauacau

SEQ ID NO: 487 - RNA, 22 nt, Artificial sequence
  >hsa-miR-29a-3p MIMAT0000086 Homo sapiens miR-29a-3p
uagcaccaucugaaaucgguua

SEQ ID NO: 488 - RNA, 22 nt, Artificial sequence
  >hsa-miR-29a-5p MIMAT0004503 Homo sapiens miR-29a-5p
acugauuucuuuugguguucag

SEQ ID NO: 489 - RNA, 24 nt, Artificial sequence
  >hsa-miR-29b-1-5p MIMAT0004514 Homo sapiens miR-29b-1-5p
gcugguuucauauggugguuuaga

SEQ ID NO: 490 - RNA, 22 nt, Artificial sequence
  >hsa-miR-29b-2-5p MIMAT0004515 Homo sapiens miR-29b-2-5p
cugguuucacaugguggcuuag

SEQ ID NO: 491 - RNA, 23 nt, Artificial sequence
  >hsa-miR-29b-3p MIMAT0000100 Homo sapiens miR-29b-3p
uagcaccauuugaaaucaguguu

SEQ ID NO: 492 - RNA, 22 nt, Artificial sequence
  >hsa-miR-29c-3p MIMAT0000681 Homo sapiens miR-29c-3p
uagcaccauuugaaaucgguua

SEQ ID NO: 493 - RNA, 22 nt, Artificial sequence
  >hsa-miR-29c-5p MIMAT0004673 Homo sapiens miR-29c-5p
ugaccgauuucuccugguguuc

SEQ ID NO: 494 - RNA, 22 nt, Artificial sequence
  >hsa-miR-300 MIMAT0004903 Homo sapiens miR-300
uauacaagggcagacucucucu

SEQ ID NO: 495 - RNA, 23 nt, Artificial sequence
  >hsa-miR-301a-3p MIMAT0000688 Homo sapiens miR-301a-3p
cagugcaauaguauugucaaagc

SEQ ID NO: 496 - RNA, 22 nt, Artificial sequence
  >hsa-miR-301a-5p MIMAT0022696 Homo sapiens miR-301a-5p
gcucugacuuuauugcacuacu

SEQ ID NO: 497 - RNA, 23 nt, Artificial sequence
  >hsa-miR-301b-3p MIMAT0004958 Homo sapiens miR-301b-3p
cagugcaaugauauugucaaagc

SEQ ID NO: 498 - RNA, 22 nt, Artificial sequence
  >hsa-miR-301b-5p MIMAT0032026 Homo sapiens miR-301b-5p
gcucugacgagguugcacuacu

SEQ ID NO: 499 - RNA, 23 nt, Artificial sequence
  >hsa-miR-302a-3p MIMAT0000684 Homo sapiens miR-302a-3p
uaagugcuuccauguuuugguga

SEQ ID NO: 500 - RNA, 23 nt, Artificial sequence
  >hsa-miR-302a-5p MIMAT0000683 Homo sapiens miR-302a-5p
acuuaaacguggauguacuugcu

SEQ ID NO: 501 - RNA, 23 nt, Artificial sequence
  >hsa-miR-302b-3p MIMAT0000715 Homo sapiens miR-302b-3p
uaagugcuuccauguuuuaguag

SEQ ID NO: 502 - RNA, 22 nt, Artificial sequence
  >hsa-miR-302b-5p MIMAT0000714 Homo sapiens miR-302b-5p
acuuuaacauggaagugcuuuc

SEQ ID NO: 503 - RNA, 23 nt, Artificial sequence
  >hsa-miR-302c-3p MIMAT0000717 Homo sapiens miR-302c-3p
uaagugcuuccauguuucagugg

SEQ ID NO: 504 - RNA, 22 nt, Artificial sequence
  >hsa-miR-302c-5p MIMAT0000716 Homo sapiens miR-302c-5p
uuuaacauggggguaccugcug

SEQ ID NO: 505 - RNA, 23 nt, Artificial sequence
  >hsa-miR-302d-3p MIMAT0000718 Homo sapiens miR-302d-3p
uaagugcuuccauguuugagugu

SEQ ID NO: 506 - RNA, 22 nt, Artificial sequence
  >hsa-miR-302d-5p MIMAT0004685 Homo sapiens miR-302d-5p
acuuuaacauggaggcacuugc

SEQ ID NO: 507 - RNA, 17 nt, Artificial sequence
  >hsa-miR-302e MIMAT0005931 Homo sapiens miR-302e
uaagugcuuccaugcuu

SEQ ID NO: 508 - RNA, 17 nt, Artificial sequence
  >hsa-miR-302f MIMAT0005932 Homo sapiens miR-302f
uaauugcuuccauguuu

SEQ ID NO: 509 - RNA, 23 nt, Artificial sequence
  >hsa-miR-3064-3p MIMAT0019865 Homo sapiens miR-3064-3p
uugccacacugcaacaccuuaca

SEQ ID NO: 510 - RNA, 21 nt, Artificial sequence
  >hsa-miR-3064-5p MIMAT0019864 Homo sapiens miR-3064-5p
ucuggcuguuguggugugcaa

SEQ ID NO: 511 - RNA, 23 nt, Artificial sequence
  >hsa-miR-3065-3p MIMAT0015378 Homo sapiens miR-3065-3p
ucagcaccaggauauuguuggag

SEQ ID NO: 512 - RNA, 23 nt, Artificial sequence
  >hsa-miR-3065-5p MIMAT0015066 Homo sapiens miR-3065-5p
ucaacaaaaucacugaugcugga

SEQ ID NO: 513 - RNA, 22 nt, Artificial sequence
  >hsa-miR-3074-3p MIMAT0015027 Homo sapiens miR-3074-3p
gauaucagcucaguaggcaccg

SEQ ID NO: 514 - RNA, 21 nt, Artificial sequence
  >hsa-miR-3074-5p MIMAT0019208 Homo sapiens miR-3074-5p
guuccugcugaacugagccag

SEQ ID NO: 515 - RNA, 22 nt, Artificial sequence
  >hsa-miR-30a-3p MIMAT0000088 Homo sapiens miR-30a-3p
cuuucagucggauguuugcagc

SEQ ID NO: 516 - RNA, 22 nt, Artificial sequence
  >hsa-miR-30a-5p MIMAT0000087 Homo sapiens miR-30a-5p
uguaaacauccucgacuggaag

SEQ ID NO: 517 - RNA, 22 nt, Artificial sequence
  >hsa-miR-30b-3p MIMAT0004589 Homo sapiens miR-30b-3p
cugggagguggauguuuacuuc

SEQ ID NO: 518 - RNA, 22 nt, Artificial sequence
  >hsa-miR-30b-5p MIMAT0000420 Homo sapiens miR-30b-5p
uguaaacauccuacacucagcu

SEQ ID NO: 519 - RNA, 22 nt, Artificial sequence
  >hsa-miR-30c-1-3p MIMAT0004674 Homo sapiens miR-30c-1-3p
cugggagaggguuguuuacucc

SEQ ID NO: 520 - RNA, 22 nt, Artificial sequence
  >hsa-miR-30c-2-3p MIMAT0004550 Homo sapiens miR-30c-2-3p
cugggagaaggcuguuuacucu

SEQ ID NO: 521 - RNA, 23 nt, Artificial sequence
  >hsa-miR-30c-5p MIMAT0000244 Homo sapiens miR-30c-5p
uguaaacauccuacacucucagc

SEQ ID NO: 522 - RNA, 22 nt, Artificial sequence
  >hsa-miR-30d-3p MIMAT0004551 Homo sapiens miR-30d-3p
cuuucagucagauguuugcugc

SEQ ID NO: 523 - RNA, 22 nt, Artificial sequence
  >hsa-miR-30d-5p MIMAT0000245 Homo sapiens miR-30d-5p
uguaaacauccccgacuggaag

SEQ ID NO: 524 - RNA, 22 nt, Artificial sequence
  >hsa-miR-30e-3p MIMAT0000693 Homo sapiens miR-30e-3p
cuuucagucggauguuuacagc

SEQ ID NO: 525 - RNA, 22 nt, Artificial sequence
  >hsa-miR-30e-5p MIMAT0000692 Homo sapiens miR-30e-5p
uguaaacauccuugacuggaag

SEQ ID NO: 526 - RNA, 22 nt, Artificial sequence
  >hsa-miR-31-3p MIMAT0004504 Homo sapiens miR-31-3p
ugcuaugccaacauauugccau

SEQ ID NO: 527 - RNA, 21 nt, Artificial sequence
  >hsa-miR-31-5p MIMAT0000089 Homo sapiens miR-31-5p
aggcaagaugcuggcauagcu

SEQ ID NO: 528 - RNA, 20 nt, Artificial sequence
  >hsa-miR-3115 MIMAT0014977 Homo sapiens miR-3115
auauggguuuacuaguuggu

SEQ ID NO: 529 - RNA, 22 nt, Artificial sequence
  >hsa-miR-3116 MIMAT0014978 Homo sapiens miR-3116
ugccuggaacauaguagggacu

SEQ ID NO: 530 - RNA, 21 nt, Artificial sequence
  >hsa-miR-3117-3p MIMAT0014979 Homo sapiens miR-3117-3p
auaggacucauauagugccag

SEQ ID NO: 531 - RNA, 20 nt, Artificial sequence
  >hsa-miR-3117-5p MIMAT0019197 Homo sapiens miR-3117-5p
agacacuauacgagucauau

SEQ ID NO: 532 - RNA, 23 nt, Artificial sequence
  >hsa-miR-3118 MIMAT0014980 Homo sapiens miR-3118
ugugacugcauuaugaaaauucu

SEQ ID NO: 533 - RNA, 20 nt, Artificial sequence
  >hsa-miR-3119 MIMAT0014981 Homo sapiens miR-3119
uggcuuuuaacuuugauggc

SEQ ID NO: 534 - RNA, 21 nt, Artificial sequence
  >hsa-miR-3120-3p MIMAT0014982 Homo sapiens miR-3120-3p
cacagcaaguguagacaggca

SEQ ID NO: 535 - RNA, 21 nt, Artificial sequence
  >hsa-miR-3120-5p MIMAT0019198 Homo sapiens miR-3120-5p
ccugucugugccugcuguaca

SEQ ID NO: 536 - RNA, 22 nt, Artificial sequence
  >hsa-miR-3121-3p MIMAT0014983 Homo sapiens miR-3121-3p
uaaauagaguaggcaaaggaca

SEQ ID NO: 537 - RNA, 22 nt, Artificial sequence
  >hsa-miR-3121-5p MIMAT0019199 Homo sapiens miR-3121-5p
uccuuugccuauucuauuuaag

SEQ ID NO: 538 - RNA, 22 nt, Artificial sequence
  >hsa-miR-3122 MIMAT0014984 Homo sapiens miR-3122
guugggacaagaggacggucuu

SEQ ID NO: 539 - RNA, 17 nt, Artificial sequence
  >hsa-miR-3123 MIMAT0014985 Homo sapiens miR-3123
cagagaauuguuuaauc

SEQ ID NO: 540 - RNA, 22 nt, Artificial sequence
  >hsa-miR-3124-3p MIMAT0019200 Homo sapiens miR-3124-3p
acuuuccucacucccgugaagu

SEQ ID NO: 541 - RNA, 21 nt, Artificial sequence
  >hsa-miR-3124-5p MIMAT0014986 Homo sapiens miR-3124-5p
uucgcgggcgaaggcaaaguc

SEQ ID NO: 542 - RNA, 20 nt, Artificial sequence
  >hsa-miR-3125 MIMAT0014988 Homo sapiens miR-3125
uagaggaagcuguggagaga

SEQ ID NO: 543 - RNA, 22 nt, Artificial sequence
  >hsa-miR-3126-3p MIMAT0015377 Homo sapiens miR-3126-3p
caucuggcauccgucacacaga

SEQ ID NO: 544 - RNA, 22 nt, Artificial sequence
  >hsa-miR-3126-5p MIMAT0014989 Homo sapiens miR-3126-5p
ugagggacagaugccagaagca

SEQ ID NO: 545 - RNA, 22 nt, Artificial sequence
  >hsa-miR-3127-3p MIMAT0019201 Homo sapiens miR-3127-3p
uccccuucugcaggccugcugg

SEQ ID NO: 546 - RNA, 23 nt, Artificial sequence
  >hsa-miR-3127-5p MIMAT0014990 Homo sapiens miR-3127-5p
aucagggcuuguggaaugggaag

SEQ ID NO: 547 - RNA, 23 nt, Artificial sequence
  >hsa-miR-3128 MIMAT0014991 Homo sapiens miR-3128
ucuggcaaguaaaaaacucucau

SEQ ID NO: 548 - RNA, 22 nt, Artificial sequence
  >hsa-miR-3129-3p MIMAT0019202 Homo sapiens miR-3129-3p
aaacuaaucucuacacugcugc

SEQ ID NO: 549 - RNA, 22 nt, Artificial sequence
  >hsa-miR-3129-5p MIMAT0014992 Homo sapiens miR-3129-5p
gcaguaguguagagauugguuu

SEQ ID NO: 550 - RNA, 21 nt, Artificial sequence
  >hsa-miR-3130-3p MIMAT0014994 Homo sapiens miR-3130-3p
gcugcaccggagacuggguaa

SEQ ID NO: 551 - RNA, 21 nt, Artificial sequence
  >hsa-miR-3130-5p MIMAT0014995 Homo sapiens miR-3130-5p
uacccagucuccggugcagcc

SEQ ID NO: 552 - RNA, 23 nt, Artificial sequence
  >hsa-miR-3131 MIMAT0014996 Homo sapiens miR-3131
ucgaggacugguggaagggccuu

SEQ ID NO: 553 - RNA, 24 nt, Artificial sequence
  >hsa-miR-3132 MIMAT0014997 Homo sapiens miR-3132
uggguagagaaggagcucagagga

SEQ ID NO: 554 - RNA, 22 nt, Artificial sequence
  >hsa-miR-3133 MIMAT0014998 Homo sapiens miR-3133
uaaagaacucuuaaaacccaau

SEQ ID NO: 555 - RNA, 23 nt, Artificial sequence
  >hsa-miR-3134 MIMAT0015000 Homo sapiens miR-3134
ugauggauaaaagacuacauauu

SEQ ID NO: 556 - RNA, 22 nt, Artificial sequence
  >hsa-miR-3135a MIMAT0015001 Homo sapiens miR-3135a
ugccuaggcugagacugcagug

SEQ ID NO: 557 - RNA, 22 nt, Artificial sequence
  >hsa-miR-3135b MIMAT0018985 Homo sapiens miR-3135b
ggcuggagcgagugcaguggug

SEQ ID NO: 558 - RNA, 22 nt, Artificial sequence
  >hsa-miR-3136-3p MIMAT0019203 Homo sapiens miR-3136-3p
uggcccaaccuauucaguuagu

SEQ ID NO: 559 - RNA, 23 nt, Artificial sequence
  >hsa-miR-3136-5p MIMAT0015003 Homo sapiens miR-3136-5p
cugacugaauagguagggucauu

SEQ ID NO: 560 - RNA, 24 nt, Artificial sequence
  >hsa-miR-3137 MIMAT0015005 Homo sapiens miR-3137
ucuguagccugggagcaauggggu

SEQ ID NO: 561 - RNA, 24 nt, Artificial sequence
  >hsa-miR-3138 MIMAT0015006 Homo sapiens miR-3138
uguggacagugagguagagggagu

SEQ ID NO: 562 - RNA, 23 nt, Artificial sequence
  >hsa-miR-3139 MIMAT0015007 Homo sapiens miR-3139
uaggagcucaacagaugccuguu

SEQ ID NO: 563 - RNA, 22 nt, Artificial sequence
  >hsa-miR-3140-3p MIMAT0015008 Homo sapiens miR-3140-3p
agcuuuugggaauucagguagu

SEQ ID NO: 564 - RNA, 21 nt, Artificial sequence
  >hsa-miR-3140-5p MIMAT0019204 Homo sapiens miR-3140-5p
accugaauuaccaaaagcuuu

SEQ ID NO: 565 - RNA, 19 nt, Artificial sequence
  >hsa-miR-3141 MIMAT0015010 Homo sapiens miR-3141
gagggcggguggaggagga

SEQ ID NO: 566 - RNA, 22 nt, Artificial sequence
  >hsa-miR-3142 MIMAT0015011 Homo sapiens miR-3142
aaggccuuucugaaccuucaga

SEQ ID NO: 567 - RNA, 25 nt, Artificial sequence
  >hsa-miR-3143 MIMAT0015012 Homo sapiens miR-3143
auaacauuguaaagcgcuucuuucg

SEQ ID NO: 568 - RNA, 22 nt, Artificial sequence
  >hsa-miR-3144-3p MIMAT0015015 Homo sapiens miR-3144-3p
auauaccuguucggucucuuua

SEQ ID NO: 569 - RNA, 22 nt, Artificial sequence
  >hsa-miR-3144-5p MIMAT0015014 Homo sapiens miR-3144-5p
aggggaccaaagagauauauag

SEQ ID NO: 570 - RNA, 24 nt, Artificial sequence
  >hsa-miR-3145-3p MIMAT0015016 Homo sapiens miR-3145-3p
agauauuuugaguguuuggaauug

SEQ ID NO: 571 - RNA, 22 nt, Artificial sequence
  >hsa-miR-3145-5p MIMAT0019205 Homo sapiens miR-3145-5p
aacuccaaacacucaaaacuca

SEQ ID NO: 572 - RNA, 22 nt, Artificial sequence
  >hsa-miR-3146 MIMAT0015018 Homo sapiens miR-3146
caugcuaggauagaaagaaugg

SEQ ID NO: 573 - RNA, 24 nt, Artificial sequence
  >hsa-miR-3147 MIMAT0015019 Homo sapiens miR-3147
gguugggcagugaggaggguguga

SEQ ID NO: 574 - RNA, 22 nt, Artificial sequence
  >hsa-miR-3148 MIMAT0015021 Homo sapiens miR-3148
uggaaaaaacuggugugugcuu

SEQ ID NO: 575 - RNA, 23 nt, Artificial sequence
  >hsa-miR-3149 MIMAT0015022 Homo sapiens miR-3149
uuuguauggauauguguguguau

SEQ ID NO: 576 - RNA, 22 nt, Artificial sequence
  >hsa-miR-3150a-3p MIMAT0015023 Homo sapiens miR-3150a-3p
cuggggagauccucgagguugg

SEQ ID NO: 577 - RNA, 22 nt, Artificial sequence
  >hsa-miR-3150a-5p MIMAT0019206 Homo sapiens miR-3150a-5p
caaccucgacgaucuccucagc

SEQ ID NO: 578 - RNA, 21 nt, Artificial sequence
  >hsa-miR-3150b-3p MIMAT0018194 Homo sapiens miR-3150b-3p
ugaggagaucgucgagguugg

SEQ ID NO: 579 - RNA, 22 nt, Artificial sequence
  >hsa-miR-3150b-5p MIMAT0019226 Homo sapiens miR-3150b-5p
caaccucgaggaucuccccagc

SEQ ID NO: 580 - RNA, 20 nt, Artificial sequence
  >hsa-miR-3151-3p MIMAT0027026 Homo sapiens miR-3151-3p
ccugaucccacagcccaccu

SEQ ID NO: 581 - RNA, 21 nt, Artificial sequence
  >hsa-miR-3151-5p MIMAT0015024 Homo sapiens miR-3151-5p
gguggggcaaugggaucaggu

SEQ ID NO: 582 - RNA, 22 nt, Artificial sequence
  >hsa-miR-3152-3p MIMAT0015025 Homo sapiens miR-3152-3p
uguguuagaauaggggcaauaa

SEQ ID NO: 583 - RNA, 22 nt, Artificial sequence
  >hsa-miR-3152-5p MIMAT0019207 Homo sapiens miR-3152-5p
auugccucuguucuaacacaag

SEQ ID NO: 584 - RNA, 23 nt, Artificial sequence
  >hsa-miR-3153 MIMAT0015026 Homo sapiens miR-3153
ggggaaagcgaguagggacauuu

SEQ ID NO: 585 - RNA, 22 nt, Artificial sequence
  >hsa-miR-3154 MIMAT0015028 Homo sapiens miR-3154
cagaaggggaguugggagcaga

SEQ ID NO: 586 - RNA, 21 nt, Artificial sequence
  >hsa-miR-3155a MIMAT0015029 Homo sapiens miR-3155a
ccaggcucugcagugggaacu

SEQ ID NO: 587 - RNA, 18 nt, Artificial sequence
  >hsa-miR-3155b MIMAT0019012 Homo sapiens miR-3155b
ccaggcucugcaguggga

SEQ ID NO: 588 - RNA, 21 nt, Artificial sequence
  >hsa-miR-3156-3p MIMAT0019209 Homo sapiens miR-3156-3p
cucccacuuccagaucuuucu

SEQ ID NO: 589 - RNA, 22 nt, Artificial sequence
  >hsa-miR-3156-5p MIMAT0015030 Homo sapiens miR-3156-5p
aaagaucuggaagugggagaca

SEQ ID NO: 590 - RNA, 22 nt, Artificial sequence
  >hsa-miR-3157-3p MIMAT0019210 Homo sapiens miR-3157-3p
cugcccuagucuagcugaagcu

SEQ ID NO: 591 - RNA, 22 nt, Artificial sequence
  >hsa-miR-3157-5p MIMAT0015031 Homo sapiens miR-3157-5p
uucagccaggcuagugcagucu

SEQ ID NO: 592 - RNA, 22 nt, Artificial sequence
  >hsa-miR-3158-3p MIMAT0015032 Homo sapiens miR-3158-3p
aagggcuuccucucugcaggac

SEQ ID NO: 593 - RNA, 21 nt, Artificial sequence
  >hsa-miR-3158-5p MIMAT0019211 Homo sapiens miR-3158-5p
ccugcagagaggaagcccuuc

SEQ ID NO: 594 - RNA, 22 nt, Artificial sequence
  >hsa-miR-3159 MIMAT0015033 Homo sapiens miR-3159
uaggauuacaagugucggccac

SEQ ID NO: 595 - RNA, 22 nt, Artificial sequence
  >hsa-miR-3160-3p MIMAT0015034 Homo sapiens miR-3160-3p
agagcugagacuagaaagccca

SEQ ID NO: 596 - RNA, 22 nt, Artificial sequence
  >hsa-miR-3160-5p MIMAT0019212 Homo sapiens miR-3160-5p
ggcuuucuagucucagcucucc

SEQ ID NO: 597 - RNA, 23 nt, Artificial sequence
  >hsa-miR-3161 MIMAT0015035 Homo sapiens miR-3161
cugauaagaacagaggcccagau

SEQ ID NO: 598 - RNA, 21 nt, Artificial sequence
  >hsa-miR-3162-3p MIMAT0019213 Homo sapiens miR-3162-3p
ucccuaccccuccacucccca

SEQ ID NO: 599 - RNA, 23 nt, Artificial sequence
  >hsa-miR-3162-5p MIMAT0015036 Homo sapiens miR-3162-5p
uuagggaguagaaggguggggag

SEQ ID NO: 600 - RNA, 22 nt, Artificial sequence
  >hsa-miR-3163 MIMAT0015037 Homo sapiens miR-3163
uauaaaaugagggcaguaagac

SEQ ID NO: 601 - RNA, 22 nt, Artificial sequence
  >hsa-miR-3164 MIMAT0015038 Homo sapiens miR-3164
ugugacuuuaagggaaauggcg

SEQ ID NO: 602 - RNA, 22 nt, Artificial sequence
  >hsa-miR-3165 MIMAT0015039 Homo sapiens miR-3165
agguggaugcaaugugaccuca

SEQ ID NO: 603 - RNA, 23 nt, Artificial sequence
  >hsa-miR-3166 MIMAT0015040 Homo sapiens miR-3166
cgcagacaaugccuacuggccua

SEQ ID NO: 604 - RNA, 22 nt, Artificial sequence
  >hsa-miR-3167 MIMAT0015042 Homo sapiens miR-3167
aggauuucagaaauacuggugu

SEQ ID NO: 605 - RNA, 17 nt, Artificial sequence
  >hsa-miR-3168 MIMAT0015043 Homo sapiens miR-3168
gaguucuacagucagac

SEQ ID NO: 606 - RNA, 22 nt, Artificial sequence
  >hsa-miR-3169 MIMAT0015044 Homo sapiens miR-3169
uaggacugugcuuggcacauag

SEQ ID NO: 607 - RNA, 22 nt, Artificial sequence
  >hsa-miR-3170 MIMAT0015045 Homo sapiens miR-3170
cugggguucugagacagacagu

SEQ ID NO: 608 - RNA, 24 nt, Artificial sequence
  >hsa-miR-3171 MIMAT0015046 Homo sapiens miR-3171
agauguauggaaucuguauauauc

SEQ ID NO: 609 - RNA, 22 nt, Artificial sequence
  >hsa-miR-3173-3p MIMAT0015048 Homo sapiens miR-3173-3p
aaaggaggaaauaggcaggcca

SEQ ID NO: 610 - RNA, 22 nt, Artificial sequence
  >hsa-miR-3173-5p MIMAT0019214 Homo sapiens miR-3173-5p
ugcccugccuguuuucuccuuu

SEQ ID NO: 611 - RNA, 23 nt, Artificial sequence
  >hsa-miR-3174 MIMAT0015051 Homo sapiens miR-3174
uagugaguuagagaugcagagcc

SEQ ID NO: 612 - RNA, 22 nt, Artificial sequence
  >hsa-miR-3175 MIMAT0015052 Homo sapiens miR-3175
cggggagagaacgcagugacgu

SEQ ID NO: 613 - RNA, 19 nt, Artificial sequence
  >hsa-miR-3176 MIMAT0015053 Homo sapiens miR-3176
acuggccugggacuaccgg

SEQ ID NO: 614 - RNA, 21 nt, Artificial sequence
  >hsa-miR-3177-3p MIMAT0015054 Homo sapiens miR-3177-3p
ugcacggcacuggggacacgu

SEQ ID NO: 615 - RNA, 23 nt, Artificial sequence
  >hsa-miR-3177-5p MIMAT0019215 Homo sapiens miR-3177-5p
uguguacacacgugccaggcgcu

SEQ ID NO: 616 - RNA, 17 nt, Artificial sequence
  >hsa-miR-3178 MIMAT0015055 Homo sapiens miR-3178
ggggcgcggccggaucg

SEQ ID NO: 617 - RNA, 22 nt, Artificial sequence
  >hsa-miR-3179 MIMAT0015056 Homo sapiens miR-3179
agaaggggugaaauuuaaacgu

SEQ ID NO: 618 - RNA, 19 nt, Artificial sequence
  >hsa-miR-3180 MIMAT0018178 Homo sapiens miR-3180
uggggcggagcuuccggag

SEQ ID NO: 619 - RNA, 22 nt, Artificial sequence
  >hsa-miR-3180-3p MIMAT0015058 Homo sapiens miR-3180-3p
uggggcggagcuuccggaggcc

SEQ ID NO: 620 - RNA, 25 nt, Artificial sequence
  >hsa-miR-3180-5p MIMAT0015057 Homo sapiens miR-3180-5p
cuuccagacgcuccgccccacgucg

SEQ ID NO: 621 - RNA, 19 nt, Artificial sequence
  >hsa-miR-3181 MIMAT0015061 Homo sapiens miR-3181
aucgggcccucggcgccgg

SEQ ID NO: 622 - RNA, 17 nt, Artificial sequence
  >hsa-miR-3182 MIMAT0015062 Homo sapiens miR-3182
gcuucuguaguguaguc

SEQ ID NO: 623 - RNA, 22 nt, Artificial sequence
  >hsa-miR-3183 MIMAT0015063 Homo sapiens miR-3183
gccucucucggagucgcucgga

SEQ ID NO: 624 - RNA, 23 nt, Artificial sequence
  >hsa-miR-3184-3p MIMAT0022731 Homo sapiens miR-3184-3p
aaagucucgcucucugccccuca

SEQ ID NO: 625 - RNA, 24 nt, Artificial sequence
  >hsa-miR-3184-5p MIMAT0015064 Homo sapiens miR-3184-5p
ugaggggccucagaccgagcuuuu

SEQ ID NO: 626 - RNA, 23 nt, Artificial sequence
  >hsa-miR-3185 MIMAT0015065 Homo sapiens miR-3185
agaagaaggcggucggucugcgg

SEQ ID NO: 627 - RNA, 21 nt, Artificial sequence
  >hsa-miR-3186-3p MIMAT0015068 Homo sapiens miR-3186-3p
ucacgcggagagauggcuuug

SEQ ID NO: 628 - RNA, 22 nt, Artificial sequence
  >hsa-miR-3186-5p MIMAT0015067 Homo sapiens miR-3186-5p
caggcgucugucuacguggcuu

SEQ ID NO: 629 - RNA, 20 nt, Artificial sequence
  >hsa-miR-3187-3p MIMAT0015069 Homo sapiens miR-3187-3p
uuggccauggggcugcgcgg

SEQ ID NO: 630 - RNA, 23 nt, Artificial sequence
  >hsa-miR-3187-5p MIMAT0019216 Homo sapiens miR-3187-5p
ccugggcagcguguggcugaagg

SEQ ID NO: 631 - RNA, 23 nt, Artificial sequence
  >hsa-miR-3188 MIMAT0015070 Homo sapiens miR-3188
agaggcuuugugcggauacgggg

SEQ ID NO: 632 - RNA, 21 nt, Artificial sequence
  >hsa-miR-3189-3p MIMAT0015071 Homo sapiens miR-3189-3p
cccuugggucugaugggguag

SEQ ID NO: 633 - RNA, 25 nt, Artificial sequence
  >hsa-miR-3189-5p MIMAT0019217 Homo sapiens miR-3189-5p
ugccccaucugugcccuggguagga

SEQ ID NO: 634 - RNA, 23 nt, Artificial sequence
  >hsa-miR-3190-3p MIMAT0022839 Homo sapiens miR-3190-3p
uguggaagguagacggccagaga

SEQ ID NO: 635 - RNA, 20 nt, Artificial sequence
  >hsa-miR-3190-5p MIMAT0015073 Homo sapiens miR-3190-5p
ucuggccagcuacgucccca

SEQ ID NO: 636 - RNA, 23 nt, Artificial sequence
  >hsa-miR-3191-3p MIMAT0015075 Homo sapiens miR-3191-3p
uggggacguagcuggccagacag

SEQ ID NO: 637 - RNA, 22 nt, Artificial sequence
  >hsa-miR-3191-5p MIMAT0022732 Homo sapiens miR-3191-5p
cucucuggccgucuaccuucca

SEQ ID NO: 638 - RNA, 21 nt, Artificial sequence
  >hsa-miR-3192-3p MIMAT0027027 Homo sapiens miR-3192-3p
cucugaucgcccucucagcuc

SEQ ID NO: 639 - RNA, 23 nt, Artificial sequence
  >hsa-miR-3192-5p MIMAT0015076 Homo sapiens miR-3192-5p
ucugggagguuguagcaguggaa

SEQ ID NO: 640 - RNA, 22 nt, Artificial sequence
  >hsa-miR-3193 MIMAT0015077 Homo sapiens miR-3193
uccugcguaggaucugaggagu

SEQ ID NO: 641 - RNA, 22 nt, Artificial sequence
  >hsa-miR-3194-3p MIMAT0019218 Homo sapiens miR-3194-3p
agcucugcugcucacuggcagu

SEQ ID NO: 642 - RNA, 21 nt, Artificial sequence
  >hsa-miR-3194-5p MIMAT0015078 Homo sapiens miR-3194-5p
ggccagccaccaggagggcug

SEQ ID NO: 643 - RNA, 17 nt, Artificial sequence
  >hsa-miR-3195 MIMAT0015079 Homo sapiens miR-3195
cgcgccgggcccggguu

SEQ ID NO: 644 - RNA, 18 nt, Artificial sequence
  >hsa-miR-3196 MIMAT0015080 Homo sapiens miR-3196
cggggcggcaggggccuc

SEQ ID NO: 645 - RNA, 23 nt, Artificial sequence
  >hsa-miR-3197 MIMAT0015082 Homo sapiens miR-3197
ggaggcgcaggcucggaaaggcg

SEQ ID NO: 646 - RNA, 22 nt, Artificial sequence
  >hsa-miR-3198 MIMAT0015083 Homo sapiens miR-3198
guggaguccuggggaauggaga

SEQ ID NO: 647 - RNA, 23 nt, Artificial sequence
  >hsa-miR-3199 MIMAT0015084 Homo sapiens miR-3199
agggacugccuuaggagaaaguu

SEQ ID NO: 648 - RNA, 22 nt, Artificial sequence
  >hsa-miR-32-3p MIMAT0004505 Homo sapiens miR-32-3p
caauuuagugugugugauauuu

SEQ ID NO: 649 - RNA, 22 nt, Artificial sequence
  >hsa-miR-32-5p MIMAT0000090 Homo sapiens miR-32-5p
uauugcacauuacuaaguugca

SEQ ID NO: 650 - RNA, 22 nt, Artificial sequence
  >hsa-miR-3200-3p MIMAT0015085 Homo sapiens miR-3200-3p
caccuugcgcuacucaggucug

SEQ ID NO: 651 - RNA, 22 nt, Artificial sequence
  >hsa-miR-3200-5p MIMAT0017392 Homo sapiens miR-3200-5p
aaucugagaaggcgcacaaggu

SEQ ID NO: 652 - RNA, 17 nt, Artificial sequence
  >hsa-miR-3201 MIMAT0015086 Homo sapiens miR-3201
gggauaugaagaaaaau

SEQ ID NO: 653 - RNA, 22 nt, Artificial sequence
  >hsa-miR-3202 MIMAT0015089 Homo sapiens miR-3202
uggaagggagaagagcuuuaau

SEQ ID NO: 654 - RNA, 22 nt, Artificial sequence
  >hsa-miR-320a MIMAT0000510 Homo sapiens miR-320a
aaaagcuggguugagagggcga

SEQ ID NO: 655 - RNA, 22 nt, Artificial sequence
  >hsa-miR-320b MIMAT0005792 Homo sapiens miR-320b
aaaagcuggguugagagggcaa

SEQ ID NO: 656 - RNA, 20 nt, Artificial sequence
  >hsa-miR-320c MIMAT0005793 Homo sapiens miR-320c
aaaagcuggguugagagggu

SEQ ID NO: 657 - RNA, 19 nt, Artificial sequence
  >hsa-miR-320d MIMAT0006764 Homo sapiens miR-320d
aaaagcuggguugagagga

SEQ ID NO: 658 - RNA, 18 nt, Artificial sequence
  >hsa-miR-320e MIMAT0015072 Homo sapiens miR-320e
aaagcuggguugagaagg

SEQ ID NO: 659 - RNA, 21 nt, Artificial sequence
  >hsa-miR-323a-3p MIMAT0000755 Homo sapiens miR-323a-3p
cacauuacacggucgaccucu

SEQ ID NO: 660 - RNA, 22 nt, Artificial sequence
  >hsa-miR-323a-5p MIMAT0004696 Homo sapiens miR-323a-5p
aggugguccguggcgcguucgc

SEQ ID NO: 661 - RNA, 22 nt, Artificial sequence
  >hsa-miR-323b-3p MIMAT0015050 Homo sapiens miR-323b-3p
cccaauacacggucgaccucuu

SEQ ID NO: 662 - RNA, 23 nt, Artificial sequence
  >hsa-miR-323b-5p MIMAT0001630 Homo sapiens miR-323b-5p
agguuguccguggugaguucgca

SEQ ID NO: 663 - RNA, 20 nt, Artificial sequence
  >hsa-miR-324-3p MIMAT0000762 Homo sapiens miR-324-3p
acugccccaggugcugcugg

SEQ ID NO: 664 - RNA, 23 nt, Artificial sequence
  >hsa-miR-324-5p MIMAT0000761 Homo sapiens miR-324-5p
cgcauccccuagggcauuggugu

SEQ ID NO: 665 - RNA, 23 nt, Artificial sequence
  >hsa-miR-325 MIMAT0000771 Homo sapiens miR-325
ccuaguagguguccaguaagugu

SEQ ID NO: 666 - RNA, 20 nt, Artificial sequence
  >hsa-miR-326 MIMAT0000756 Homo sapiens miR-326
ccucugggcccuuccuccag

SEQ ID NO: 667 - RNA, 22 nt, Artificial sequence
  >hsa-miR-328-3p MIMAT0000752 Homo sapiens miR-328-3p
cuggcccucucugcccuuccgu

SEQ ID NO: 668 - RNA, 23 nt, Artificial sequence
  >hsa-miR-328-5p MIMAT0026486 Homo sapiens miR-328-5p
gggggggcaggaggggcucaggg

SEQ ID NO: 669 - RNA, 22 nt, Artificial sequence
  >hsa-miR-329-3p MIMAT0001629 Homo sapiens miR-329-3p
aacacaccugguuaaccucuuu

SEQ ID NO: 670 - RNA, 23 nt, Artificial sequence
  >hsa-miR-329-5p MIMAT0026555 Homo sapiens miR-329-5p
gagguuuucuggguuucuguuuc

SEQ ID NO: 671 - RNA, 23 nt, Artificial sequence
  >hsa-miR-330-3p MIMAT0000751 Homo sapiens miR-330-3p
gcaaagcacacggccugcagaga

SEQ ID NO: 672 - RNA, 22 nt, Artificial sequence
  >hsa-miR-330-5p MIMAT0004693 Homo sapiens miR-330-5p
ucucugggccugugucuuaggc

SEQ ID NO: 673 - RNA, 21 nt, Artificial sequence
  >hsa-miR-331-3p MIMAT0000760 Homo sapiens miR-331-3p
gccccugggccuauccuagaa

SEQ ID NO: 674 - RNA, 22 nt, Artificial sequence
  >hsa-miR-331-5p MIMAT0004700 Homo sapiens miR-331-5p
cuagguauggucccagggaucc

SEQ ID NO: 675 - RNA, 22 nt, Artificial sequence
  >hsa-miR-335-3p MIMAT0004703 Homo sapiens miR-335-3p
uuuuucauuauugcuccugacc

SEQ ID NO: 676 - RNA, 23 nt, Artificial sequence
  >hsa-miR-335-5p MIMAT0000765 Homo sapiens miR-335-5p
ucaagagcaauaacgaaaaaugu

SEQ ID NO: 677 - RNA, 22 nt, Artificial sequence
  >hsa-miR-337-3p MIMAT0000754 Homo sapiens miR-337-3p
cuccuauaugaugccuuucuuc

SEQ ID NO: 678 - RNA, 21 nt, Artificial sequence
  >hsa-miR-337-5p MIMAT0004695 Homo sapiens miR-337-5p
gaacggcuucauacaggaguu

SEQ ID NO: 679 - RNA, 22 nt, Artificial sequence
  >hsa-miR-338-3p MIMAT0000763 Homo sapiens miR-338-3p
uccagcaucagugauuuuguug

SEQ ID NO: 680 - RNA, 22 nt, Artificial sequence
  >hsa-miR-338-5p MIMAT0004701 Homo sapiens miR-338-5p
aacaauauccuggugcugagug

SEQ ID NO: 681 - RNA, 23 nt, Artificial sequence
  >hsa-miR-339-3p MIMAT0004702 Homo sapiens miR-339-3p
ugagcgccucgacgacagagccg

SEQ ID NO: 682 - RNA, 23 nt, Artificial sequence
  >hsa-miR-339-5p MIMAT0000764 Homo sapiens miR-339-5p
ucccuguccuccaggagcucacg

SEQ ID NO: 683 - RNA, 22 nt, Artificial sequence
  >hsa-miR-33a-3p MIMAT0004506 Homo sapiens miR-33a-3p
caauguuuccacagugcaucac

SEQ ID NO: 684 - RNA, 21 nt, Artificial sequence
  >hsa-miR-33a-5p MIMAT0000091 Homo sapiens miR-33a-5p
gugcauuguaguugcauugca

SEQ ID NO: 685 - RNA, 22 nt, Artificial sequence
  >hsa-miR-33b-3p MIMAT0004811 Homo sapiens miR-33b-3p
cagugccucggcagugcagccc

SEQ ID NO: 686 - RNA, 20 nt, Artificial sequence
  >hsa-miR-33b-5p MIMAT0003301 Homo sapiens miR-33b-5p
gugcauugcuguugcauugc

SEQ ID NO: 687 - RNA, 22 nt, Artificial sequence
  >hsa-miR-340-3p MIMAT0000750 Homo sapiens miR-340-3p
uccgucucaguuacuuuauagc

SEQ ID NO: 688 - RNA, 22 nt, Artificial sequence
  >hsa-miR-340-5p MIMAT0004692 Homo sapiens miR-340-5p
uuauaaagcaaugagacugauu

SEQ ID NO: 689 - RNA, 23 nt, Artificial sequence
  >hsa-miR-342-3p MIMAT0000753 Homo sapiens miR-342-3p
ucucacacagaaaucgcacccgu

SEQ ID NO: 690 - RNA, 21 nt, Artificial sequence
  >hsa-miR-342-5p MIMAT0004694 Homo sapiens miR-342-5p
aggggugcuaucugugauuga

SEQ ID NO: 691 - RNA, 22 nt, Artificial sequence
  >hsa-miR-345-3p MIMAT0022698 Homo sapiens miR-345-3p
gcccugaacgaggggucuggag

SEQ ID NO: 692 - RNA, 22 nt, Artificial sequence
  >hsa-miR-345-5p MIMAT0000772 Homo sapiens miR-345-5p
gcugacuccuaguccagggcuc

SEQ ID NO: 693 - RNA, 23 nt, Artificial sequence
  >hsa-miR-346 MIMAT0000773 Homo sapiens miR-346
ugucugcccgcaugccugccucu

SEQ ID NO: 694 - RNA, 22 nt, Artificial sequence
  >hsa-miR-34a-3p MIMAT0004557 Homo sapiens miR-34a-3p
caaucagcaaguauacugcccu

SEQ ID NO: 695 - RNA, 22 nt, Artificial sequence
  >hsa-miR-34a-5p MIMAT0000255 Homo sapiens miR-34a-5p
uggcagugucuuagcugguugu

SEQ ID NO: 696 - RNA, 22 nt, Artificial sequence
  >hsa-miR-34b-3p MIMAT0004676 Homo sapiens miR-34b-3p
caaucacuaacuccacugccau

SEQ ID NO: 697 - RNA, 23 nt, Artificial sequence
  >hsa-miR-34b-5p MIMAT0000685 Homo sapiens miR-34b-5p
uaggcagugucauuagcugauug

SEQ ID NO: 698 - RNA, 22 nt, Artificial sequence
  >hsa-miR-34c-3p MIMAT0004677 Homo sapiens miR-34c-3p
aaucacuaaccacacggccagg

SEQ ID NO: 699 - RNA, 23 nt, Artificial sequence
  >hsa-miR-34c-5p MIMAT0000686 Homo sapiens miR-34c-5p
aggcaguguaguuagcugauugc

SEQ ID NO: 700 - RNA, 24 nt, Artificial sequence
  >hsa-miR-3529-3p MIMAT0022741 Homo sapiens miR-3529-3p
aacaacaaaaucacuagucuucca

SEQ ID NO: 701 - RNA, 22 nt, Artificial sequence
  >hsa-miR-3529-5p MIMAT0019828 Homo sapiens miR-3529-5p
agguagacugggauuuguuguu

SEQ ID NO: 702 - RNA, 22 nt, Artificial sequence
  >hsa-miR-3591-3p MIMAT0019877 Homo sapiens miR-3591-3p
aaacaccauugucacacuccac

SEQ ID NO: 703 - RNA, 23 nt, Artificial sequence
  >hsa-miR-3591-5p MIMAT0019876 Homo sapiens miR-3591-5p
uuuagugugauaauggcguuuga

SEQ ID NO: 704 - RNA, 23 nt, Artificial sequence
  >hsa-miR-3605-3p MIMAT0017982 Homo sapiens miR-3605-3p
ccuccguguuaccuguccucuag

SEQ ID NO: 705 - RNA, 23 nt, Artificial sequence
  >hsa-miR-3605-5p MIMAT0017981 Homo sapiens miR-3605-5p
ugaggauggauagcaaggaagcc

SEQ ID NO: 706 - RNA, 21 nt, Artificial sequence
  >hsa-miR-3606-3p MIMAT0022965 Homo sapiens miR-3606-3p
aaaauuucuuucacuacuuag

SEQ ID NO: 707 - RNA, 21 nt, Artificial sequence
  >hsa-miR-3606-5p MIMAT0017983 Homo sapiens miR-3606-5p
uuagugaaggcuauuuuaauu

SEQ ID NO: 708 - RNA, 20 nt, Artificial sequence
  >hsa-miR-3607-3p MIMAT0017985 Homo sapiens miR-3607-3p
acuguaaacgcuuucugaug

SEQ ID NO: 709 - RNA, 22 nt, Artificial sequence
  >hsa-miR-3607-5p MIMAT0017984 Homo sapiens miR-3607-5p
gcaugugaugaagcaaaucagu

SEQ ID NO: 710 - RNA, 24 nt, Artificial sequence
  >hsa-miR-3609 MIMAT0017986 Homo sapiens miR-3609
caaagugaugaguaauacuggcug

SEQ ID NO: 711 - RNA, 23 nt, Artificial sequence
  >hsa-miR-361-3p MIMAT0004682 Homo sapiens miR-361-3p
ucccccaggugugauucugauuu

SEQ ID NO: 712 - RNA, 22 nt, Artificial sequence
  >hsa-miR-361-5p MIMAT0000703 Homo sapiens miR-361-5p
uuaucagaaucuccagggguac

SEQ ID NO: 713 - RNA, 20 nt, Artificial sequence
  >hsa-miR-3610 MIMAT0017987 Homo sapiens miR-3610
gaaucggaaaggaggcgccg

SEQ ID NO: 714 - RNA, 21 nt, Artificial sequence
  >hsa-miR-3611 MIMAT0017988 Homo sapiens miR-3611
uugugaagaaagaaauucuua

SEQ ID NO: 715 - RNA, 22 nt, Artificial sequence
  >hsa-miR-3612 MIMAT0017989 Homo sapiens miR-3612
aggaggcaucuugagaaaugga

SEQ ID NO: 716 - RNA, 24 nt, Artificial sequence
  >hsa-miR-3613-3p MIMAT0017991 Homo sapiens miR-3613-3p
acaaaaaaaaaagcccaacccuuc

SEQ ID NO: 717 - RNA, 22 nt, Artificial sequence
  >hsa-miR-3613-5p MIMAT0017990 Homo sapiens miR-3613-5p
uguuguacuuuuuuuuuuguuc

SEQ ID NO: 718 - RNA, 23 nt, Artificial sequence
  >hsa-miR-3614-3p MIMAT0017993 Homo sapiens miR-3614-3p
uagccuucagaucuugguguuuu

SEQ ID NO: 719 - RNA, 23 nt, Artificial sequence
  >hsa-miR-3614-5p MIMAT0017992 Homo sapiens miR-3614-5p
ccacuuggaucugaaggcugccc

SEQ ID NO: 720 - RNA, 21 nt, Artificial sequence
  >hsa-miR-3615 MIMAT0017994 Homo sapiens miR-3615
ucucucggcuccucgcggcuc

SEQ ID NO: 721 - RNA, 23 nt, Artificial sequence
  >hsa-miR-3616-3p MIMAT0017996 Homo sapiens miR-3616-3p
cgagggcauuucaugaugcaggc

SEQ ID NO: 722 - RNA, 22 nt, Artificial sequence
  >hsa-miR-3616-5p MIMAT0017995 Homo sapiens miR-3616-5p
augaagugcacucaugauaugu

SEQ ID NO: 723 - RNA, 23 nt, Artificial sequence
  >hsa-miR-3617-3p MIMAT0022966 Homo sapiens miR-3617-3p
caucagcacccuauguccuuucu

SEQ ID NO: 724 - RNA, 22 nt, Artificial sequence
  >hsa-miR-3617-5p MIMAT0017997 Homo sapiens miR-3617-5p
aaagacauaguugcaagauggg

SEQ ID NO: 725 - RNA, 22 nt, Artificial sequence
  >hsa-miR-3618 MIMAT0017998 Homo sapiens miR-3618
ugucuacauuaaugaaaagagc

SEQ ID NO: 726 - RNA, 22 nt, Artificial sequence
  >hsa-miR-3619-3p MIMAT0019219 Homo sapiens miR-3619-3p
gggaccauccugccugcugugg

SEQ ID NO: 727 - RNA, 22 nt, Artificial sequence
  >hsa-miR-3619-5p MIMAT0017999 Homo sapiens miR-3619-5p
ucagcaggcaggcuggugcagc

SEQ ID NO: 728 - RNA, 22 nt, Artificial sequence
  >hsa-miR-362-3p MIMAT0004683 Homo sapiens miR-362-3p
aacacaccuauucaaggauuca

SEQ ID NO: 729 - RNA, 24 nt, Artificial sequence
  >hsa-miR-362-5p MIMAT0000705 Homo sapiens miR-362-5p
aauccuuggaaccuaggugugagu

SEQ ID NO: 730 - RNA, 22 nt, Artificial sequence
  >hsa-miR-3620-3p MIMAT0018001 Homo sapiens miR-3620-3p
ucacccugcaucccgcacccag

SEQ ID NO: 731 - RNA, 22 nt, Artificial sequence
  >hsa-miR-3620-5p MIMAT0022967 Homo sapiens miR-3620-5p
gugggcugggcugggcugggcc

SEQ ID NO: 732 - RNA, 20 nt, Artificial sequence
  >hsa-miR-3621 MIMAT0018002 Homo sapiens miR-3621
cgcgggucggggucugcagg

SEQ ID NO: 733 - RNA, 22 nt, Artificial sequence
  >hsa-miR-3622a-3p MIMAT0018004 Homo sapiens miR-3622a-3p
ucaccugaccucccaugccugu

SEQ ID NO: 734 - RNA, 22 nt, Artificial sequence
  >hsa-miR-3622a-5p MIMAT0018003 Homo sapiens miR-3622a-5p
caggcacgggagcucaggugag

SEQ ID NO: 735 - RNA, 21 nt, Artificial sequence
  >hsa-miR-3622b-3p MIMAT0018006 Homo sapiens miR-3622b-3p
ucaccugagcucccgugccug

SEQ ID NO: 736 - RNA, 20 nt, Artificial sequence
  >hsa-miR-3622b-5p MIMAT0018005 Homo sapiens miR-3622b-5p
aggcaugggaggucagguga

SEQ ID NO: 737 - RNA, 22 nt, Artificial sequence
  >hsa-miR-363-3p MIMAT0000707 Homo sapiens miR-363-3p
aauugcacgguauccaucugua

SEQ ID NO: 738 - RNA, 22 nt, Artificial sequence
  >hsa-miR-363-5p MIMAT0003385 Homo sapiens miR-363-5p
cggguggaucacgaugcaauuu

SEQ ID NO: 739 - RNA, 22 nt, Artificial sequence
  >hsa-miR-3646 MIMAT0018065 Homo sapiens miR-3646
aaaaugaaaugagcccagccca

SEQ ID NO: 740 - RNA, 21 nt, Artificial sequence
  >hsa-miR-3648 MIMAT0018068 Homo sapiens miR-3648
agccgcggggaucgccgaggg

SEQ ID NO: 741 - RNA, 19 nt, Artificial sequence
  >hsa-miR-3649 MIMAT0018069 Homo sapiens miR-3649
agggaccugagugucuaag

SEQ ID NO: 742 - RNA, 19 nt, Artificial sequence
  >hsa-miR-3650 MIMAT0018070 Homo sapiens miR-3650
aggugugucuguagagucc

SEQ ID NO: 743 - RNA, 24 nt, Artificial sequence
  >hsa-miR-3651 MIMAT0018071 Homo sapiens miR-3651
cauagcccggucgcugguacauga

SEQ ID NO: 744 - RNA, 18 nt, Artificial sequence
  >hsa-miR-3652 MIMAT0018072 Homo sapiens miR-3652
cggcuggaggugugagga

SEQ ID NO: 745 - RNA, 18 nt, Artificial sequence
  >hsa-miR-3653-3p MIMAT0018073 Homo sapiens miR-3653-3p
cuaagaaguugacugaag

SEQ ID NO: 746 - RNA, 20 nt, Artificial sequence
  >hsa-miR-3653-5p MIMAT0032110 Homo sapiens miR-3653-5p
ccuccugaugauucuucuuc

SEQ ID NO: 747 - RNA, 19 nt, Artificial sequence
  >hsa-miR-3654 MIMAT0018074 Homo sapiens miR-3654
gacuggacaagcugaggaa

SEQ ID NO: 748 - RNA, 21 nt, Artificial sequence
  >hsa-miR-3655 MIMAT0018075 Homo sapiens miR-3655
gcuugucgcugcgguguugcu

SEQ ID NO: 749 - RNA, 17 nt, Artificial sequence
  >hsa-miR-3656 MIMAT0018076 Homo sapiens miR-3656
ggcgggugcgggggugg

SEQ ID NO: 750 - RNA, 21 nt, Artificial sequence
  >hsa-miR-3657 MIMAT0018077 Homo sapiens miR-3657
ugugucccauuauuggugauu

SEQ ID NO: 751 - RNA, 22 nt, Artificial sequence
  >hsa-miR-3658 MIMAT0018078 Homo sapiens miR-3658
uuuaagaaaacaccauggagau

SEQ ID NO: 752 - RNA, 21 nt, Artificial sequence
  >hsa-miR-3659 MIMAT0018080 Homo sapiens miR-3659
ugaguguugucuacgagggca

SEQ ID NO: 753 - RNA, 22 nt, Artificial sequence
  >hsa-miR-365a-3p MIMAT0000710 Homo sapiens miR-365a-3p
uaaugccccuaaaaauccuuau

SEQ ID NO: 754 - RNA, 23 nt, Artificial sequence
  >hsa-miR-365a-5p MIMAT0009199 Homo sapiens miR-365a-5p
agggacuuuugggggcagaugug

SEQ ID NO: 755 - RNA, 22 nt, Artificial sequence
  >hsa-miR-365b-3p MIMAT0022834 Homo sapiens miR-365b-3p
uaaugccccuaaaaauccuuau

SEQ ID NO: 756 - RNA, 22 nt, Artificial sequence
  >hsa-miR-365b-5p MIMAT0022833 Homo sapiens miR-365b-5p
agggacuuucaggggcagcugu

SEQ ID NO: 757 - RNA, 21 nt, Artificial sequence
  >hsa-miR-3660 MIMAT0018081 Homo sapiens miR-3660
acugacaggagagcauuuuga

SEQ ID NO: 758 - RNA, 22 nt, Artificial sequence
  >hsa-miR-3661 MIMAT0018082 Homo sapiens miR-3661
ugaccugggacucggacagcug

SEQ ID NO: 759 - RNA, 24 nt, Artificial sequence
  >hsa-miR-3662 MIMAT0018083 Homo sapiens miR-3662
gaaaaugaugaguagugacugaug

SEQ ID NO: 760 - RNA, 23 nt, Artificial sequence
  >hsa-miR-3663-3p MIMAT0018085 Homo sapiens miR-3663-3p
ugagcaccacacaggccgggcgc

SEQ ID NO: 761 - RNA, 21 nt, Artificial sequence
  >hsa-miR-3663-5p MIMAT0018084 Homo sapiens miR-3663-5p
gcuggucugcguggugcucgg

SEQ ID NO: 762 - RNA, 22 nt, Artificial sequence
  >hsa-miR-3664-3p MIMAT0019220 Homo sapiens miR-3664-3p
ucucaggaguaaagacagaguu

SEQ ID NO: 763 - RNA, 22 nt, Artificial sequence
  >hsa-miR-3664-5p MIMAT0018086 Homo sapiens miR-3664-5p
aacucugucuucacucaugagu

SEQ ID NO: 764 - RNA, 18 nt, Artificial sequence
  >hsa-miR-3665 MIMAT0018087 Homo sapiens miR-3665
agcaggugcggggcggcg

SEQ ID NO: 765 - RNA, 21 nt, Artificial sequence
  >hsa-miR-3666 MIMAT0018088 Homo sapiens miR-3666
cagugcaaguguagaugccga

SEQ ID NO: 766 - RNA, 22 nt, Artificial sequence
  >hsa-miR-3667-3p MIMAT0018090 Homo sapiens miR-3667-3p
accuuccucuccaugggucuuu

SEQ ID NO: 767 - RNA, 22 nt, Artificial sequence
  >hsa-miR-3667-5p MIMAT0018089 Homo sapiens miR-3667-5p
aaagacccauugaggagaaggu

SEQ ID NO: 768 - RNA, 21 nt, Artificial sequence
  >hsa-miR-3668 MIMAT0018091 Homo sapiens miR-3668
aauguagagauugaucaaaau

SEQ ID NO: 769 - RNA, 22 nt, Artificial sequence
  >hsa-miR-367-3p MIMAT0000719 Homo sapiens miR-367-3p
aauugcacuuuagcaaugguga

SEQ ID NO: 770 - RNA, 22 nt, Artificial sequence
  >hsa-miR-367-5p MIMAT0004686 Homo sapiens miR-367-5p
acuguugcuaauaugcaacucu

SEQ ID NO: 771 - RNA, 24 nt, Artificial sequence
  >hsa-miR-3670 MIMAT0018093 Homo sapiens miR-3670
agagcucacagcuguccuucucua

SEQ ID NO: 772 - RNA, 22 nt, Artificial sequence
  >hsa-miR-3671 MIMAT0018094 Homo sapiens miR-3671
aucaaauaaggacuagucugca

SEQ ID NO: 773 - RNA, 23 nt, Artificial sequence
  >hsa-miR-3672 MIMAT0018095 Homo sapiens miR-3672
augagacucauguaaaacaucuu

SEQ ID NO: 774 - RNA, 22 nt, Artificial sequence
  >hsa-miR-3674 MIMAT0018097 Homo sapiens miR-3674
auuguagaaccuaagauuggcc

SEQ ID NO: 775 - RNA, 22 nt, Artificial sequence
  >hsa-miR-3675-3p MIMAT0018099 Homo sapiens miR-3675-3p
caucucuaaggaacucccccaa

SEQ ID NO: 776 - RNA, 23 nt, Artificial sequence
  >hsa-miR-3675-5p MIMAT0018098 Homo sapiens miR-3675-5p
uauggggcuucuguagagauuuc

SEQ ID NO: 777 - RNA, 22 nt, Artificial sequence
  >hsa-miR-3677-3p MIMAT0018101 Homo sapiens miR-3677-3p
cucgugggcucuggccacggcc

SEQ ID NO: 778 - RNA, 22 nt, Artificial sequence
  >hsa-miR-3677-5p MIMAT0019221 Homo sapiens miR-3677-5p
caguggccagagcccugcagug

SEQ ID NO: 779 - RNA, 22 nt, Artificial sequence
  >hsa-miR-3678-3p MIMAT0018103 Homo sapiens miR-3678-3p
cugcagaguuuguacggaccgg

SEQ ID NO: 780 - RNA, 20 nt, Artificial sequence
  >hsa-miR-3678-5p MIMAT0018102 Homo sapiens miR-3678-5p
uccguacaaacucugcugug

SEQ ID NO: 781 - RNA, 22 nt, Artificial sequence
  >hsa-miR-3679-3p MIMAT0018105 Homo sapiens miR-3679-3p
cuuccccccaguaaucuucauc

SEQ ID NO: 782 - RNA, 23 nt, Artificial sequence
  >hsa-miR-3679-5p MIMAT0018104 Homo sapiens miR-3679-5p
ugaggauauggcagggaagggga

SEQ ID NO: 783 - RNA, 23 nt, Artificial sequence
  >hsa-miR-3680-3p MIMAT0018107 Homo sapiens miR-3680-3p
uuuugcaugacccugggaguagg

SEQ ID NO: 784 - RNA, 22 nt, Artificial sequence
  >hsa-miR-3680-5p MIMAT0018106 Homo sapiens miR-3680-5p
gacucacucacaggauugugca

SEQ ID NO: 785 - RNA, 22 nt, Artificial sequence
  >hsa-miR-3681-3p MIMAT0018109 Homo sapiens miR-3681-3p
acacagugcuucauccacuacu

SEQ ID NO: 786 - RNA, 22 nt, Artificial sequence
  >hsa-miR-3681-5p MIMAT0018108 Homo sapiens miR-3681-5p
uaguggaugaugcacucugugc

SEQ ID NO: 787 - RNA, 21 nt, Artificial sequence
  >hsa-miR-3682-3p MIMAT0018110 Homo sapiens miR-3682-3p
ugaugauacagguggagguag

SEQ ID NO: 788 - RNA, 22 nt, Artificial sequence
  >hsa-miR-3682-5p MIMAT0019222 Homo sapiens miR-3682-5p
cuacuucuaccuguguuaucau

SEQ ID NO: 789 - RNA, 22 nt, Artificial sequence
  >hsa-miR-3683 MIMAT0018111 Homo sapiens miR-3683
ugcgacauuggaaguaguauca

SEQ ID NO: 790 - RNA, 21 nt, Artificial sequence
  >hsa-miR-3684 MIMAT0018112 Homo sapiens miR-3684
uuagaccuaguacacguccuu

SEQ ID NO: 791 - RNA, 22 nt, Artificial sequence
  >hsa-miR-3685 MIMAT0018113 Homo sapiens miR-3685
uuuccuacccuaccugaagacu

SEQ ID NO: 792 - RNA, 22 nt, Artificial sequence
  >hsa-miR-3686 MIMAT0018114 Homo sapiens miR-3686
aucuguaagagaaaguaaauga

SEQ ID NO: 793 - RNA, 24 nt, Artificial sequence
  >hsa-miR-3687 MIMAT0018115 Homo sapiens miR-3687
cccggacaggcguucgugcgacgu

SEQ ID NO: 794 - RNA, 22 nt, Artificial sequence
  >hsa-miR-3688-3p MIMAT0018116 Homo sapiens miR-3688-3p
uauggaaagacuuugccacucu

SEQ ID NO: 795 - RNA, 21 nt, Artificial sequence
  >hsa-miR-3688-5p MIMAT0019223 Homo sapiens miR-3688-5p
aguggcaaagucuuuccauau

SEQ ID NO: 796 - RNA, 22 nt, Artificial sequence
  >hsa-miR-3689a-3p MIMAT0018118 Homo sapiens miR-3689a-3p
cugggaggugugauaucguggu

SEQ ID NO: 797 - RNA, 22 nt, Artificial sequence
  >hsa-miR-3689a-5p MIMAT0018117 Homo sapiens miR-3689a-5p
ugugauaucaugguuccuggga

SEQ ID NO: 798 - RNA, 22 nt, Artificial sequence
  >hsa-miR-3689b-3p MIMAT0018181 Homo sapiens miR-3689b-3p
cugggaggugugauauuguggu

SEQ ID NO: 799 - RNA, 22 nt, Artificial sequence
  >hsa-miR-3689b-5p MIMAT0018180 Homo sapiens miR-3689b-5p
ugugauaucaugguuccuggga

SEQ ID NO: 800 - RNA, 22 nt, Artificial sequence
  >hsa-miR-3689c MIMAT0019007 Homo sapiens miR-3689c
cugggaggugugauauuguggu

SEQ ID NO: 801 - RNA, 22 nt, Artificial sequence
  >hsa-miR-3689d MIMAT0019008 Homo sapiens miR-3689d
gggaggugugaucucacacucg

SEQ ID NO: 802 - RNA, 22 nt, Artificial sequence
  >hsa-miR-3689e MIMAT0019009 Homo sapiens miR-3689e
ugugauaucaugguuccuggga

SEQ ID NO: 803 - RNA, 22 nt, Artificial sequence
  >hsa-miR-3689f MIMAT0019010 Homo sapiens miR-3689f
ugugauaucgugcuuccuggga

SEQ ID NO: 804 - RNA, 21 nt, Artificial sequence
  >hsa-miR-369-3p MIMAT0000721 Homo sapiens miR-369-3p
aauaauacaugguugaucuuu

SEQ ID NO: 805 - RNA, 22 nt, Artificial sequence
  >hsa-miR-369-5p MIMAT0001621 Homo sapiens miR-369-5p
agaucgaccguguuauauucgc

SEQ ID NO: 806 - RNA, 23 nt, Artificial sequence
  >hsa-miR-3690 MIMAT0018119 Homo sapiens miR-3690
accuggacccagcguagacaaag

SEQ ID NO: 807 - RNA, 22 nt, Artificial sequence
  >hsa-miR-3691-3p MIMAT0019224 Homo sapiens miR-3691-3p
accaagucugcgucauccucuc

SEQ ID NO: 808 - RNA, 23 nt, Artificial sequence
  >hsa-miR-3691-5p MIMAT0018120 Homo sapiens miR-3691-5p
aguggaugauggagacucgguac

SEQ ID NO: 809 - RNA, 24 nt, Artificial sequence
  >hsa-miR-3692-3p MIMAT0018122 Homo sapiens miR-3692-3p
guuccacacugacacugcagaagu

SEQ ID NO: 810 - RNA, 24 nt, Artificial sequence
  >hsa-miR-3692-5p MIMAT0018121 Homo sapiens miR-3692-5p
ccugcuggucaggaguggauacug

SEQ ID NO: 811 - RNA, 22 nt, Artificial sequence
  >hsa-miR-370-3p MIMAT0000722 Homo sapiens miR-370-3p
gccugcugggguggaaccuggu

SEQ ID NO: 812 - RNA, 22 nt, Artificial sequence
  >hsa-miR-370-5p MIMAT0026483 Homo sapiens miR-370-5p
caggucacgucucugcaguuac

SEQ ID NO: 813 - RNA, 20 nt, Artificial sequence
  >hsa-miR-3713 MIMAT0018164 Homo sapiens miR-3713
gguauccguuuggggauggu

SEQ ID NO: 814 - RNA, 22 nt, Artificial sequence
  >hsa-miR-3714 MIMAT0018165 Homo sapiens miR-3714
gaaggcagcagugcuccccugu

SEQ ID NO: 815 - RNA, 23 nt, Artificial sequence
  >hsa-miR-371a-3p MIMAT0000723 Homo sapiens miR-371a-3p
aagugccgccaucuuuugagugu

SEQ ID NO: 816 - RNA, 20 nt, Artificial sequence
  >hsa-miR-371a-5p MIMAT0004687 Homo sapiens miR-371a-5p
acucaaacugugggggcacu

SEQ ID NO: 817 - RNA, 23 nt, Artificial sequence
  >hsa-miR-371b-3p MIMAT0019893 Homo sapiens miR-371b-3p
aagugcccccacaguuugagugc

SEQ ID NO: 818 - RNA, 22 nt, Artificial sequence
  >hsa-miR-371b-5p MIMAT0019892 Homo sapiens miR-371b-5p
acucaaaagauggcggcacuuu

SEQ ID NO: 819 - RNA, 23 nt, Artificial sequence
  >hsa-miR-372-3p MIMAT0000724 Homo sapiens miR-372-3p
aaagugcugcgacauuugagcgu

SEQ ID NO: 820 - RNA, 23 nt, Artificial sequence
  >hsa-miR-372-5p MIMAT0026484 Homo sapiens miR-372-5p
ccucaaauguggagcacuauucu

SEQ ID NO: 821 - RNA, 23 nt, Artificial sequence
  >hsa-miR-373-3p MIMAT0000726 Homo sapiens miR-373-3p
gaagugcuucgauuuuggggugu

SEQ ID NO: 822 - RNA, 22 nt, Artificial sequence
  >hsa-miR-373-5p MIMAT0000725 Homo sapiens miR-373-5p
acucaaaaugggggcgcuuucc

SEQ ID NO: 823 - RNA, 22 nt, Artificial sequence
  >hsa-miR-374a-3p MIMAT0004688 Homo sapiens miR-374a-3p
cuuaucagauuguauuguaauu

SEQ ID NO: 824 - RNA, 22 nt, Artificial sequence
  >hsa-miR-374a-5p MIMAT0000727 Homo sapiens miR-374a-5p
uuauaauacaaccugauaagug

SEQ ID NO: 825 - RNA, 22 nt, Artificial sequence
  >hsa-miR-374b-3p MIMAT0004956 Homo sapiens miR-374b-3p
cuuagcagguuguauuaucauu

SEQ ID NO: 826 - RNA, 22 nt, Artificial sequence
  >hsa-miR-374b-5p MIMAT0004955 Homo sapiens miR-374b-5p
auauaauacaaccugcuaagug

SEQ ID NO: 827 - RNA, 22 nt, Artificial sequence
  >hsa-miR-374c-3p MIMAT0022735 Homo sapiens miR-374c-3p
cacuuagcagguuguauuauau

SEQ ID NO: 828 - RNA, 22 nt, Artificial sequence
  >hsa-miR-374c-5p MIMAT0018443 Homo sapiens miR-374c-5p
auaauacaaccugcuaagugcu

SEQ ID NO: 829 - RNA, 22 nt, Artificial sequence
  >hsa-miR-375 MIMAT0000728 Homo sapiens miR-375
uuuguucguucggcucgcguga

SEQ ID NO: 830 - RNA, 21 nt, Artificial sequence
  >hsa-miR-376a-2-5p MIMAT0022928 Homo sapiens miR-376a-2-5p
gguagauuuuccuucuauggu

SEQ ID NO: 831 - RNA, 21 nt, Artificial sequence
  >hsa-miR-376a-3p MIMAT0000729 Homo sapiens miR-376a-3p
aucauagaggaaaauccacgu

SEQ ID NO: 832 - RNA, 22 nt, Artificial sequence
  >hsa-miR-376a-5p MIMAT0003386 Homo sapiens miR-376a-5p
guagauucuccuucuaugagua

SEQ ID NO: 833 - RNA, 22 nt, Artificial sequence
  >hsa-miR-376b-3p MIMAT0002172 Homo sapiens miR-376b-3p
aucauagaggaaaauccauguu

SEQ ID NO: 834 - RNA, 22 nt, Artificial sequence
  >hsa-miR-376b-5p MIMAT0022923 Homo sapiens miR-376b-5p
cguggauauuccuucuauguuu

SEQ ID NO: 835 - RNA, 21 nt, Artificial sequence
  >hsa-miR-376c-3p MIMAT0000720 Homo sapiens miR-376c-3p
aacauagaggaaauuccacgu

SEQ ID NO: 836 - RNA, 21 nt, Artificial sequence
  >hsa-miR-376c-5p MIMAT0022861 Homo sapiens miR-376c-5p
gguggauauuccuucuauguu

SEQ ID NO: 837 - RNA, 22 nt, Artificial sequence
  >hsa-miR-377-3p MIMAT0000730 Homo sapiens miR-377-3p
aucacacaaaggcaacuuuugu

SEQ ID NO: 838 - RNA, 22 nt, Artificial sequence
  >hsa-miR-377-5p MIMAT0004689 Homo sapiens miR-377-5p
agagguugcccuuggugaauuc

SEQ ID NO: 839 - RNA, 22 nt, Artificial sequence
  >hsa-miR-378a-3p MIMAT0000732 Homo sapiens miR-378a-3p
acuggacuuggagucagaaggc

SEQ ID NO: 840 - RNA, 22 nt, Artificial sequence
  >hsa-miR-378a-5p MIMAT0000731 Homo sapiens miR-378a-5p
cuccugacuccagguccugugu

SEQ ID NO: 841 - RNA, 19 nt, Artificial sequence
  >hsa-miR-378b MIMAT0014999 Homo sapiens miR-378b
acuggacuuggaggcagaa

SEQ ID NO: 842 - RNA, 25 nt, Artificial sequence
  >hsa-miR-378c MIMAT0016847 Homo sapiens miR-378c
acuggacuuggagucagaagagugg

SEQ ID NO: 843 - RNA, 20 nt, Artificial sequence
  >hsa-miR-378d MIMAT0018926 Homo sapiens miR-378d
acuggacuuggagucagaaa

SEQ ID NO: 844 - RNA, 19 nt, Artificial sequence
  >hsa-miR-378e MIMAT0018927 Homo sapiens miR-378e
acuggacuuggagucagga

SEQ ID NO: 845 - RNA, 20 nt, Artificial sequence
  >hsa-miR-378f MIMAT0018932 Homo sapiens miR-378f
acuggacuuggagccagaag

SEQ ID NO: 846 - RNA, 20 nt, Artificial sequence
  >hsa-miR-378g MIMAT0018937 Homo sapiens miR-378g
acugggcuuggagucagaag

SEQ ID NO: 847 - RNA, 21 nt, Artificial sequence
  >hsa-miR-378h MIMAT0018984 Homo sapiens miR-378h
acuggacuuggugucagaugg

SEQ ID NO: 848 - RNA, 21 nt, Artificial sequence
  >hsa-miR-378i MIMAT0019074 Homo sapiens miR-378i
acuggacuaggagucagaagg

SEQ ID NO: 849 - RNA, 19 nt, Artificial sequence
  >hsa-miR-378j MIMAT0024612 Homo sapiens miR-378j
acuggauuuggagccagaa

SEQ ID NO: 850 - RNA, 22 nt, Artificial sequence
  >hsa-miR-379-3p MIMAT0004690 Homo sapiens miR-379-3p
uauguaacaugguccacuaacu

SEQ ID NO: 851 - RNA, 21 nt, Artificial sequence
  >hsa-miR-379-5p MIMAT0000733 Homo sapiens miR-379-5p
ugguagacuauggaacguagg

SEQ ID NO: 852 - RNA, 22 nt, Artificial sequence
  >hsa-miR-380-3p MIMAT0000735 Homo sapiens miR-380-3p
uauguaauaugguccacaucuu

SEQ ID NO: 853 - RNA, 22 nt, Artificial sequence
  >hsa-miR-380-5p MIMAT0000734 Homo sapiens miR-380-5p
ugguugaccauagaacaugcgc

SEQ ID NO: 854 - RNA, 22 nt, Artificial sequence
  >hsa-miR-381-3p MIMAT0000736 Homo sapiens miR-381-3p
uauacaagggcaagcucucugu

SEQ ID NO: 855 - RNA, 22 nt, Artificial sequence
  >hsa-miR-381-5p MIMAT0022862 Homo sapiens miR-381-5p
agcgagguugcccuuuguauau

SEQ ID NO: 856 - RNA, 21 nt, Artificial sequence
  >hsa-miR-382-3p MIMAT0022697 Homo sapiens miR-382-3p
aaucauucacggacaacacuu

SEQ ID NO: 857 - RNA, 22 nt, Artificial sequence
  >hsa-miR-382-5p MIMAT0000737 Homo sapiens miR-382-5p
gaaguuguucgugguggauucg

SEQ ID NO: 858 - RNA, 19 nt, Artificial sequence
  >hsa-miR-383-3p MIMAT0026485 Homo sapiens miR-383-3p
acagcacugccuggucaga

SEQ ID NO: 859 - RNA, 22 nt, Artificial sequence
  >hsa-miR-383-5p MIMAT0000738 Homo sapiens miR-383-5p
agaucagaaggugauuguggcu

SEQ ID NO: 860 - RNA, 20 nt, Artificial sequence
  >hsa-miR-384 MIMAT0001075 Homo sapiens miR-384
auuccuagaaauuguucaua

SEQ ID NO: 861 - RNA, 22 nt, Artificial sequence
  >hsa-miR-3907 MIMAT0018179 Homo sapiens miR-3907
aggugcuccaggcuggcucaca

SEQ ID NO: 862 - RNA, 22 nt, Artificial sequence
  >hsa-miR-3908 MIMAT0018182 Homo sapiens miR-3908
gagcaauguagguagacuguuu

SEQ ID NO: 863 - RNA, 22 nt, Artificial sequence
  >hsa-miR-3909 MIMAT0018183 Homo sapiens miR-3909
uguccucuagggccugcagucu

SEQ ID NO: 864 - RNA, 20 nt, Artificial sequence
  >hsa-miR-3910 MIMAT0018184 Homo sapiens miR-3910
aaaggcauaaaaccaagaca

SEQ ID NO: 865 - RNA, 22 nt, Artificial sequence
  >hsa-miR-3911 MIMAT0018185 Homo sapiens miR-3911
uguguggauccuggaggaggca

SEQ ID NO: 866 - RNA, 21 nt, Artificial sequence
  >hsa-miR-3912-3p MIMAT0018186 Homo sapiens miR-3912-3p
uaacgcauaauauggacaugu

SEQ ID NO: 867 - RNA, 21 nt, Artificial sequence
  >hsa-miR-3912-5p MIMAT0027036 Homo sapiens miR-3912-5p
auguccauauuauggguuagu

SEQ ID NO: 868 - RNA, 22 nt, Artificial sequence
  >hsa-miR-3913-3p MIMAT0019225 Homo sapiens miR-3913-3p
agacaucaagaucagucccaaa

SEQ ID NO: 869 - RNA, 22 nt, Artificial sequence
  >hsa-miR-3913-5p MIMAT0018187 Homo sapiens miR-3913-5p
uuugggacugaucuugaugucu

SEQ ID NO: 870 - RNA, 22 nt, Artificial sequence
  >hsa-miR-3914 MIMAT0018188 Homo sapiens miR-3914
aaggaaccagaaaaugagaagu

SEQ ID NO: 871 - RNA, 22 nt, Artificial sequence
  >hsa-miR-3915 MIMAT0018189 Homo sapiens miR-3915
uugaggaaaagauggucuuauu

SEQ ID NO: 872 - RNA, 26 nt, Artificial sequence
  >hsa-miR-3916 MIMAT0018190 Homo sapiens miR-3916
aagaggaagaaauggcugguucucag

SEQ ID NO: 873 - RNA, 20 nt, Artificial sequence
  >hsa-miR-3917 MIMAT0018191 Homo sapiens miR-3917
gcucggacugagcagguggg

SEQ ID NO: 874 - RNA, 21 nt, Artificial sequence
  >hsa-miR-3918 MIMAT0018192 Homo sapiens miR-3918
acagggccgcagauggagacu

SEQ ID NO: 875 - RNA, 21 nt, Artificial sequence
  >hsa-miR-3919 MIMAT0018193 Homo sapiens miR-3919
gcagagaacaaaggacucagu

SEQ ID NO: 876 - RNA, 22 nt, Artificial sequence
  >hsa-miR-3920 MIMAT0018195 Homo sapiens miR-3920
acugauuaucuuaacucucuga

SEQ ID NO: 877 - RNA, 23 nt, Artificial sequence
  >hsa-miR-3921 MIMAT0018196 Homo sapiens miR-3921
ucucugaguaccauaugccuugu

SEQ ID NO: 878 - RNA, 22 nt, Artificial sequence
  >hsa-miR-3922-3p MIMAT0018197 Homo sapiens miR-3922-3p
ucuggccuugacuugacucuuu

SEQ ID NO: 879 - RNA, 23 nt, Artificial sequence
  >hsa-miR-3922-5p MIMAT0019227 Homo sapiens miR-3922-5p
ucaaggccagaggucccacagca

SEQ ID NO: 880 - RNA, 22 nt, Artificial sequence
  >hsa-miR-3923 MIMAT0018198 Homo sapiens miR-3923
aacuaguaauguuggauuaggg

SEQ ID NO: 881 - RNA, 22 nt, Artificial sequence
  >hsa-miR-3924 MIMAT0018199 Homo sapiens miR-3924
auauguauaugugacugcuacu

SEQ ID NO: 882 - RNA, 21 nt, Artificial sequence
  >hsa-miR-3925-3p MIMAT0019228 Homo sapiens miR-3925-3p
acuccaguuuuaguucucuug

SEQ ID NO: 883 - RNA, 22 nt, Artificial sequence
  >hsa-miR-3925-5p MIMAT0018200 Homo sapiens miR-3925-5p
aagagaacugaaaguggagccu

SEQ ID NO: 884 - RNA, 21 nt, Artificial sequence
  >hsa-miR-3926 MIMAT0018201 Homo sapiens miR-3926
uggccaaaaagcaggcagaga

SEQ ID NO: 885 - RNA, 22 nt, Artificial sequence
  >hsa-miR-3927-3p MIMAT0018202 Homo sapiens miR-3927-3p
cagguagauauuugauaggcau

SEQ ID NO: 886 - RNA, 21 nt, Artificial sequence
  >hsa-miR-3927-5p MIMAT0022970 Homo sapiens miR-3927-5p
gccuaucacauaucugccugu

SEQ ID NO: 887 - RNA, 22 nt, Artificial sequence
  >hsa-miR-3928-3p MIMAT0018205 Homo sapiens miR-3928-3p
ggaggaaccuuggagcuucggc

SEQ ID NO: 888 - RNA, 23 nt, Artificial sequence
  >hsa-miR-3928-5p MIMAT0027037 Homo sapiens miR-3928-5p
ugaagcucuaagguuccgccugc

SEQ ID NO: 889 - RNA, 23 nt, Artificial sequence
  >hsa-miR-3929 MIMAT0018206 Homo sapiens miR-3929
gaggcugaugugaguagaccacu

SEQ ID NO: 890 - RNA, 22 nt, Artificial sequence
  >hsa-miR-3934-3p MIMAT0022975 Homo sapiens miR-3934-3p
ugcucagguugcacagcuggga

SEQ ID NO: 891 - RNA, 22 nt, Artificial sequence
  >hsa-miR-3934-5p MIMAT0018349 Homo sapiens miR-3934-5p
ucagguguggaaacugaggcag

SEQ ID NO: 892 - RNA, 22 nt, Artificial sequence
  >hsa-miR-3935 MIMAT0018350 Homo sapiens miR-3935
uguagauacgagcaccagccac

SEQ ID NO: 893 - RNA, 22 nt, Artificial sequence
  >hsa-miR-3936 MIMAT0018351 Homo sapiens miR-3936
uaagggguguauggcagaugca

SEQ ID NO: 894 - RNA, 23 nt, Artificial sequence
  >hsa-miR-3937 MIMAT0018352 Homo sapiens miR-3937
acaggcggcuguagcaauggggg

SEQ ID NO: 895 - RNA, 22 nt, Artificial sequence
  >hsa-miR-3938 MIMAT0018353 Homo sapiens miR-3938
aauucccuuguagauaacccgg

SEQ ID NO: 896 - RNA, 22 nt, Artificial sequence
  >hsa-miR-3939 MIMAT0018355 Homo sapiens miR-3939
uacgcgcagaccacaggauguc

SEQ ID NO: 897 - RNA, 22 nt, Artificial sequence
  >hsa-miR-3940-3p MIMAT0018356 Homo sapiens miR-3940-3p
cagcccggaucccagcccacuu

SEQ ID NO: 898 - RNA, 20 nt, Artificial sequence
  >hsa-miR-3940-5p MIMAT0019229 Homo sapiens miR-3940-5p
guggguuggggcgggcucug

SEQ ID NO: 899 - RNA, 22 nt, Artificial sequence
  >hsa-miR-3941 MIMAT0018357 Homo sapiens miR-3941
uuacacacaacugaggaucaua

SEQ ID NO: 900 - RNA, 21 nt, Artificial sequence
  >hsa-miR-3942-3p MIMAT0019230 Homo sapiens miR-3942-3p
uuucagauaacaguauuacau

SEQ ID NO: 901 - RNA, 22 nt, Artificial sequence
  >hsa-miR-3942-5p MIMAT0018358 Homo sapiens miR-3942-5p
aagcaauacuguuaccugaaau

SEQ ID NO: 902 - RNA, 23 nt, Artificial sequence
  >hsa-miR-3943 MIMAT0018359 Homo sapiens miR-3943
uagcccccaggcuucacuuggcg

SEQ ID NO: 903 - RNA, 23 nt, Artificial sequence
  >hsa-miR-3944-3p MIMAT0018360 Homo sapiens miR-3944-3p
uucgggcuggccugcugcuccgg

SEQ ID NO: 904 - RNA, 21 nt, Artificial sequence
  >hsa-miR-3944-5p MIMAT0019231 Homo sapiens miR-3944-5p
ugugcagcaggccaaccgaga

SEQ ID NO: 905 - RNA, 23 nt, Artificial sequence
  >hsa-miR-3945 MIMAT0018361 Homo sapiens miR-3945
agggcauaggagaggguugauau

SEQ ID NO: 906 - RNA, 20 nt, Artificial sequence
  >hsa-miR-3960 MIMAT0019337 Homo sapiens miR-3960
ggcggcggcggaggcggggg

SEQ ID NO: 907 - RNA, 22 nt, Artificial sequence
  >hsa-miR-3972 MIMAT0019357 Homo sapiens miR-3972
cugccagccccguuccagggca

SEQ ID NO: 908 - RNA, 23 nt, Artificial sequence
  >hsa-miR-3973 MIMAT0019358 Homo sapiens miR-3973
acaaaguacagcauuagccuuag

SEQ ID NO: 909 - RNA, 23 nt, Artificial sequence
  >hsa-miR-3974 MIMAT0019359 Homo sapiens miR-3974
aaaggucauuguaagguuaaugc

SEQ ID NO: 910 - RNA, 22 nt, Artificial sequence
  >hsa-miR-3975 MIMAT0019360 Homo sapiens miR-3975
ugaggcuaaugcacuacuucac

SEQ ID NO: 911 - RNA, 24 nt, Artificial sequence
  >hsa-miR-3976 MIMAT0019361 Homo sapiens miR-3976
uauagagagcaggaagauuaaugu

SEQ ID NO: 912 - RNA, 23 nt, Artificial sequence
  >hsa-miR-3977 MIMAT0019362 Homo sapiens miR-3977
gugcuucaucguaauuaaccuua

SEQ ID NO: 913 - RNA, 24 nt, Artificial sequence
  >hsa-miR-3978 MIMAT0019363 Homo sapiens miR-3978
guggaaagcaugcauccagggugu

SEQ ID NO: 914 - RNA, 22 nt, Artificial sequence
  >hsa-miR-409-3p MIMAT0001639 Homo sapiens miR-409-3p
gaauguugcucggugaaccccu

SEQ ID NO: 915 - RNA, 23 nt, Artificial sequence
  >hsa-miR-409-5p MIMAT0001638 Homo sapiens miR-409-5p
agguuacccgagcaacuuugcau

SEQ ID NO: 916 - RNA, 21 nt, Artificial sequence
  >hsa-miR-410-3p MIMAT0002171 Homo sapiens miR-410-3p
aauauaacacagauggccugu

SEQ ID NO: 917 - RNA, 21 nt, Artificial sequence
  >hsa-miR-410-5p MIMAT0026558 Homo sapiens miR-410-5p
agguugucugugaugaguucg

SEQ ID NO: 918 - RNA, 22 nt, Artificial sequence
  >hsa-miR-411-3p MIMAT0004813 Homo sapiens miR-411-3p
uauguaacacgguccacuaacc

SEQ ID NO: 919 - RNA, 21 nt, Artificial sequence
  >hsa-miR-411-5p MIMAT0003329 Homo sapiens miR-411-5p
uaguagaccguauagcguacg

SEQ ID NO: 920 - RNA, 23 nt, Artificial sequence
  >hsa-miR-412-3p MIMAT0002170 Homo sapiens miR-412-3p
acuucaccugguccacuagccgu

SEQ ID NO: 921 - RNA, 23 nt, Artificial sequence
  >hsa-miR-412-5p MIMAT0026557 Homo sapiens miR-412-5p
uggucgaccaguuggaaaguaau

SEQ ID NO: 922 - RNA, 23 nt, Artificial sequence
  >hsa-miR-421 MIMAT0003339 Homo sapiens miR-421
aucaacagacauuaauugggcgc

SEQ ID NO: 923 - RNA, 22 nt, Artificial sequence
  >hsa-miR-422a MIMAT0001339 Homo sapiens miR-422a
acuggacuuagggucagaaggc

SEQ ID NO: 924 - RNA, 23 nt, Artificial sequence
  >hsa-miR-423-3p MIMAT0001340 Homo sapiens miR-423-3p
agcucggucugaggccccucagu

SEQ ID NO: 925 - RNA, 23 nt, Artificial sequence
  >hsa-miR-423-5p MIMAT0004748 Homo sapiens miR-423-5p
ugaggggcagagagcgagacuuu

SEQ ID NO: 926 - RNA, 21 nt, Artificial sequence
  >hsa-miR-424-3p MIMAT0004749 Homo sapiens miR-424-3p
caaaacgugaggcgcugcuau

SEQ ID NO: 927 - RNA, 22 nt, Artificial sequence
  >hsa-miR-424-5p MIMAT0001341 Homo sapiens miR-424-5p
cagcagcaauucauguuuugaa

SEQ ID NO: 928 - RNA, 22 nt, Artificial sequence
  >hsa-miR-425-3p MIMAT0001343 Homo sapiens miR-425-3p
aucgggaaugucguguccgccc

SEQ ID NO: 929 - RNA, 23 nt, Artificial sequence
  >hsa-miR-425-5p MIMAT0003393 Homo sapiens miR-425-5p
aaugacacgaucacucccguuga

SEQ ID NO: 930 - RNA, 17 nt, Artificial sequence
  >hsa-miR-4251 MIMAT0016883 Homo sapiens miR-4251
ccugagaaaagggccaa

SEQ ID NO: 931 - RNA, 19 nt, Artificial sequence
  >hsa-miR-4252 MIMAT0016886 Homo sapiens miR-4252
ggccacugagucagcacca

SEQ ID NO: 932 - RNA, 18 nt, Artificial sequence
  >hsa-miR-4253 MIMAT0016882 Homo sapiens miR-4253
agggcauguccagggggu

SEQ ID NO: 933 - RNA, 23 nt, Artificial sequence
  >hsa-miR-4254 MIMAT0016884 Homo sapiens miR-4254
gccuggagcuacuccaccaucuc

SEQ ID NO: 934 - RNA, 17 nt, Artificial sequence
  >hsa-miR-4255 MIMAT0016885 Homo sapiens miR-4255
caguguucagagaugga

SEQ ID NO: 935 - RNA, 18 nt, Artificial sequence
  >hsa-miR-4256 MIMAT0016877 Homo sapiens miR-4256
aucugaccugaugaaggu

SEQ ID NO: 936 - RNA, 18 nt, Artificial sequence
  >hsa-miR-4257 MIMAT0016878 Homo sapiens miR-4257
ccagagguggggacugag

SEQ ID NO: 937 - RNA, 17 nt, Artificial sequence
  >hsa-miR-4258 MIMAT0016879 Homo sapiens miR-4258
ccccgccaccgccuugg

SEQ ID NO: 938 - RNA, 22 nt, Artificial sequence
  >hsa-miR-4259 MIMAT0016880 Homo sapiens miR-4259
caguugggucuaggggucagga

SEQ ID NO: 939 - RNA, 19 nt, Artificial sequence
  >hsa-miR-4260 MIMAT0016881 Homo sapiens miR-4260
cuuggggcauggaguccca

SEQ ID NO: 940 - RNA, 16 nt, Artificial sequence
  >hsa-miR-4261 MIMAT0016890 Homo sapiens miR-4261
aggaaacagggaccca

SEQ ID NO: 941 - RNA, 17 nt, Artificial sequence
  >hsa-miR-4262 MIMAT0016894 Homo sapiens miR-4262
gacauucagacuaccug

SEQ ID NO: 942 - RNA, 18 nt, Artificial sequence
  >hsa-miR-4263 MIMAT0016898 Homo sapiens miR-4263
auucuaagugccuuggcc

SEQ ID NO: 943 - RNA, 17 nt, Artificial sequence
  >hsa-miR-4264 MIMAT0016899 Homo sapiens miR-4264
acucagucauggucauu

SEQ ID NO: 944 - RNA, 19 nt, Artificial sequence
  >hsa-miR-4265 MIMAT0016891 Homo sapiens miR-4265
cugugggcucagcucuggg

SEQ ID NO: 945 - RNA, 16 nt, Artificial sequence
  >hsa-miR-4266 MIMAT0016892 Homo sapiens miR-4266
cuaggaggccuuggcc

SEQ ID NO: 946 - RNA, 16 nt, Artificial sequence
  >hsa-miR-4267 MIMAT0016893 Homo sapiens miR-4267
uccagcucgguggcac

SEQ ID NO: 947 - RNA, 21 nt, Artificial sequence
  >hsa-miR-4268 MIMAT0016896 Homo sapiens miR-4268
ggcuccuccucucaggaugug

SEQ ID NO: 948 - RNA, 21 nt, Artificial sequence
  >hsa-miR-4269 MIMAT0016897 Homo sapiens miR-4269
gcaggcacagacagcccuggc

SEQ ID NO: 949 - RNA, 20 nt, Artificial sequence
  >hsa-miR-4270 MIMAT0016900 Homo sapiens miR-4270
ucagggagucaggggagggc

SEQ ID NO: 950 - RNA, 19 nt, Artificial sequence
  >hsa-miR-4271 MIMAT0016901 Homo sapiens miR-4271
gggggaagaaaaggugggg

SEQ ID NO: 951 - RNA, 18 nt, Artificial sequence
  >hsa-miR-4272 MIMAT0016902 Homo sapiens miR-4272
cauucaacuagugauugu

SEQ ID NO: 952 - RNA, 18 nt, Artificial sequence
  >hsa-miR-4273 MIMAT0016903 Homo sapiens miR-4273
guguucucugauggacag

SEQ ID NO: 953 - RNA, 18 nt, Artificial sequence
  >hsa-miR-4274 MIMAT0016906 Homo sapiens miR-4274
cagcagucccucccccug

SEQ ID NO: 954 - RNA, 17 nt, Artificial sequence
  >hsa-miR-4275 MIMAT0016905 Homo sapiens miR-4275
ccaauuaccacuucuuu

SEQ ID NO: 955 - RNA, 17 nt, Artificial sequence
  >hsa-miR-4276 MIMAT0016904 Homo sapiens miR-4276
cucagugacucaugugc

SEQ ID NO: 956 - RNA, 21 nt, Artificial sequence
  >hsa-miR-4277 MIMAT0016908 Homo sapiens miR-4277
gcaguucugagcacaguacac

SEQ ID NO: 957 - RNA, 18 nt, Artificial sequence
  >hsa-miR-4278 MIMAT0016910 Homo sapiens miR-4278
cuaggggguuugcccuug

SEQ ID NO: 958 - RNA, 16 nt, Artificial sequence
  >hsa-miR-4279 MIMAT0016909 Homo sapiens miR-4279
cucuccucccggcuuc

SEQ ID NO: 959 - RNA, 21 nt, Artificial sequence
  >hsa-miR-4280 MIMAT0016911 Homo sapiens miR-4280
gaguguaguucugagcagagc

SEQ ID NO: 960 - RNA, 18 nt, Artificial sequence
  >hsa-miR-4281 MIMAT0016907 Homo sapiens miR-4281
gggucccggggagggggg

SEQ ID NO: 961 - RNA, 18 nt, Artificial sequence
  >hsa-miR-4282 MIMAT0016912 Homo sapiens miR-4282
uaaaauuugcauccagga

SEQ ID NO: 962 - RNA, 17 nt, Artificial sequence
  >hsa-miR-4283 MIMAT0016914 Homo sapiens miR-4283
uggggcucagcgaguuu

SEQ ID NO: 963 - RNA, 18 nt, Artificial sequence
  >hsa-miR-4284 MIMAT0016915 Homo sapiens miR-4284
gggcucacaucaccccau

SEQ ID NO: 964 - RNA, 18 nt, Artificial sequence
  >hsa-miR-4285 MIMAT0016913 Homo sapiens miR-4285
gcggcgaguccgacucau

SEQ ID NO: 965 - RNA, 17 nt, Artificial sequence
  >hsa-miR-4286 MIMAT0016916 Homo sapiens miR-4286
accccacuccugguacc

SEQ ID NO: 966 - RNA, 19 nt, Artificial sequence
  >hsa-miR-4287 MIMAT0016917 Homo sapiens miR-4287
ucucccuugagggcacuuu

SEQ ID NO: 967 - RNA, 17 nt, Artificial sequence
  >hsa-miR-4288 MIMAT0016918 Homo sapiens miR-4288
uugucugcugaguuucc

SEQ ID NO: 968 - RNA, 19 nt, Artificial sequence
  >hsa-miR-4289 MIMAT0016920 Homo sapiens miR-4289
gcauugugcagggcuauca

SEQ ID NO: 969 - RNA, 22 nt, Artificial sequence
  >hsa-miR-429 MIMAT0001536 Homo sapiens miR-429
uaauacugucugguaaaaccgu

SEQ ID NO: 970 - RNA, 19 nt, Artificial sequence
  >hsa-miR-4290 MIMAT0016921 Homo sapiens miR-4290
ugcccuccuuucuucccuc

SEQ ID NO: 971 - RNA, 16 nt, Artificial sequence
  >hsa-miR-4291 MIMAT0016922 Homo sapiens miR-4291
uucagcaggaacagcu

SEQ ID NO: 972 - RNA, 18 nt, Artificial sequence
  >hsa-miR-4292 MIMAT0016919 Homo sapiens miR-4292
ccccugggccggccuugg

SEQ ID NO: 973 - RNA, 17 nt, Artificial sequence
  >hsa-miR-4293 MIMAT0016848 Homo sapiens miR-4293
cagccugacaggaacag

SEQ ID NO: 974 - RNA, 17 nt, Artificial sequence
  >hsa-miR-4294 MIMAT0016849 Homo sapiens miR-4294
gggagucuacagcaggg

SEQ ID NO: 975 - RNA, 18 nt, Artificial sequence
  >hsa-miR-4295 MIMAT0016844 Homo sapiens miR-4295
cagugcaauguuuuccuu

SEQ ID NO: 976 - RNA, 17 nt, Artificial sequence
  >hsa-miR-4296 MIMAT0016845 Homo sapiens miR-4296
augugggcucaggcuca

SEQ ID NO: 977 - RNA, 16 nt, Artificial sequence
  >hsa-miR-4297 MIMAT0016846 Homo sapiens miR-4297
ugccuuccugucugug

SEQ ID NO: 978 - RNA, 22 nt, Artificial sequence
  >hsa-miR-4298 MIMAT0016852 Homo sapiens miR-4298
cugggacaggaggaggaggcag

SEQ ID NO: 979 - RNA, 18 nt, Artificial sequence
  >hsa-miR-4299 MIMAT0016851 Homo sapiens miR-4299
gcuggugacaugagaggc

SEQ ID NO: 980 - RNA, 18 nt, Artificial sequence
  >hsa-miR-4300 MIMAT0016853 Homo sapiens miR-4300
ugggagcuggacuacuuc

SEQ ID NO: 981 - RNA, 20 nt, Artificial sequence
  >hsa-miR-4301 MIMAT0016850 Homo sapiens miR-4301
ucccacuacuucacuuguga

SEQ ID NO: 982 - RNA, 18 nt, Artificial sequence
  >hsa-miR-4302 MIMAT0016855 Homo sapiens miR-4302
ccaguguggcucagcgag

SEQ ID NO: 983 - RNA, 17 nt, Artificial sequence
  >hsa-miR-4303 MIMAT0016856 Homo sapiens miR-4303
uucugagcugaggacag

SEQ ID NO: 984 - RNA, 17 nt, Artificial sequence
  >hsa-miR-4304 MIMAT0016854 Homo sapiens miR-4304
ccggcauguccagggca

SEQ ID NO: 985 - RNA, 18 nt, Artificial sequence
  >hsa-miR-4305 MIMAT0016857 Homo sapiens miR-4305
ccuagacaccuccaguuc

SEQ ID NO: 986 - RNA, 17 nt, Artificial sequence
  >hsa-miR-4306 MIMAT0016858 Homo sapiens miR-4306
uggagagaaaggcagua

SEQ ID NO: 987 - RNA, 19 nt, Artificial sequence
  >hsa-miR-4307 MIMAT0016860 Homo sapiens miR-4307
aauguuuuuuccuguuucc

SEQ ID NO: 988 - RNA, 18 nt, Artificial sequence
  >hsa-miR-4308 MIMAT0016861 Homo sapiens miR-4308
ucccuggaguuucuucuu

SEQ ID NO: 989 - RNA, 18 nt, Artificial sequence
  >hsa-miR-4309 MIMAT0016859 Homo sapiens miR-4309
cuggagucuaggauucca

SEQ ID NO: 990 - RNA, 22 nt, Artificial sequence
  >hsa-miR-431-3p MIMAT0004757 Homo sapiens miR-431-3p
caggucgucuugcagggcuucu

SEQ ID NO: 991 - RNA, 21 nt, Artificial sequence
  >hsa-miR-431-5p MIMAT0001625 Homo sapiens miR-431-5p
ugucuugcaggccgucaugca

SEQ ID NO: 992 - RNA, 16 nt, Artificial sequence
  >hsa-miR-4310 MIMAT0016862 Homo sapiens miR-4310
gcagcauucauguccc

SEQ ID NO: 993 - RNA, 18 nt, Artificial sequence
  >hsa-miR-4311 MIMAT0016863 Homo sapiens miR-4311
gaaagagagcugagugug

SEQ ID NO: 994 - RNA, 19 nt, Artificial sequence
  >hsa-miR-4312 MIMAT0016864 Homo sapiens miR-4312
ggccuuguuccugucccca

SEQ ID NO: 995 - RNA, 20 nt, Artificial sequence
  >hsa-miR-4313 MIMAT0016865 Homo sapiens miR-4313
agcccccuggccccaaaccc

SEQ ID NO: 996 - RNA, 18 nt, Artificial sequence
  >hsa-miR-4314 MIMAT0016868 Homo sapiens miR-4314
cucugggaaaugggacag

SEQ ID NO: 997 - RNA, 18 nt, Artificial sequence
  >hsa-miR-4315 MIMAT0016866 Homo sapiens miR-4315
ccgcuuucugagcuggac

SEQ ID NO: 998 - RNA, 17 nt, Artificial sequence
  >hsa-miR-4316 MIMAT0016867 Homo sapiens miR-4316
ggugaggcuagcuggug

SEQ ID NO: 999 - RNA, 17 nt, Artificial sequence
  >hsa-miR-4317 MIMAT0016872 Homo sapiens miR-4317
acauugccagggaguuu

SEQ ID NO: 1000 - RNA, 17 nt, Artificial sequence
  >hsa-miR-4318 MIMAT0016869 Homo sapiens miR-4318
cacuguggguacaugcu

SEQ ID NO: 1001 - RNA, 17 nt, Artificial sequence
  >hsa-miR-4319 MIMAT0016870 Homo sapiens miR-4319
ucccugagcaaagccac

SEQ ID NO: 1002 - RNA, 21 nt, Artificial sequence
  >hsa-miR-432-3p MIMAT0002815 Homo sapiens miR-432-3p
cuggauggcuccuccaugucu

SEQ ID NO: 1003 - RNA, 23 nt, Artificial sequence
  >hsa-miR-432-5p MIMAT0002814 Homo sapiens miR-432-5p
ucuuggaguaggucauugggugg

SEQ ID NO: 1004 - RNA, 18 nt, Artificial sequence
  >hsa-miR-4320 MIMAT0016871 Homo sapiens miR-4320
gggauucuguagcuuccu

SEQ ID NO: 1005 - RNA, 21 nt, Artificial sequence
  >hsa-miR-4321 MIMAT0016874 Homo sapiens miR-4321
uuagcgguggaccgcccugcg

SEQ ID NO: 1006 - RNA, 21 nt, Artificial sequence
  >hsa-miR-4322 MIMAT0016873 Homo sapiens miR-4322
cugugggcucagcgcgugggg

SEQ ID NO: 1007 - RNA, 18 nt, Artificial sequence
  >hsa-miR-4323 MIMAT0016875 Homo sapiens miR-4323
cagccccacagccucaga

SEQ ID NO: 1008 - RNA, 20 nt, Artificial sequence
  >hsa-miR-4324 MIMAT0016876 Homo sapiens miR-4324
cccugagacccuaaccuuaa

SEQ ID NO: 1009 - RNA, 18 nt, Artificial sequence
  >hsa-miR-4325 MIMAT0016887 Homo sapiens miR-4325
uugcacuugucucaguga

SEQ ID NO: 1010 - RNA, 20 nt, Artificial sequence
  >hsa-miR-4326 MIMAT0016888 Homo sapiens miR-4326
uguuccucugucucccagac

SEQ ID NO: 1011 - RNA, 19 nt, Artificial sequence
  >hsa-miR-4327 MIMAT0016889 Homo sapiens miR-4327
ggcuugcaugggggacugg

SEQ ID NO: 1012 - RNA, 17 nt, Artificial sequence
  >hsa-miR-4328 MIMAT0016926 Homo sapiens miR-4328
ccaguuuucccaggauu

SEQ ID NO: 1013 - RNA, 19 nt, Artificial sequence
  >hsa-miR-4329 MIMAT0016923 Homo sapiens miR-4329
ccugagacccuaguuccac

SEQ ID NO: 1014 - RNA, 22 nt, Artificial sequence
  >hsa-miR-433-3p MIMAT0001627 Homo sapiens miR-433-3p
aucaugaugggcuccucggugu

SEQ ID NO: 1015 - RNA, 22 nt, Artificial sequence
  >hsa-miR-433-5p MIMAT0026554 Homo sapiens miR-433-5p
uacggugagccugucauuauuc

SEQ ID NO: 1016 - RNA, 19 nt, Artificial sequence
  >hsa-miR-4330 MIMAT0016924 Homo sapiens miR-4330
ccucagaucagagccuugc

SEQ ID NO: 1017 - RNA, 18 nt, Artificial sequence
  >hsa-miR-4417 MIMAT0018929 Homo sapiens miR-4417
ggugggcuucccggaggg

SEQ ID NO: 1018 - RNA, 18 nt, Artificial sequence
  >hsa-miR-4418 MIMAT0018930 Homo sapiens miR-4418
cacugcaggacucagcag

SEQ ID NO: 1019 - RNA, 17 nt, Artificial sequence
  >hsa-miR-4419a MIMAT0018931 Homo sapiens miR-4419a
ugagggaggagacugca

SEQ ID NO: 1020 - RNA, 18 nt, Artificial sequence
  >hsa-miR-4419b MIMAT0019034 Homo sapiens miR-4419b
gaggcugaaggaagaugg

SEQ ID NO: 1021 - RNA, 22 nt, Artificial sequence
  >hsa-miR-4420 MIMAT0018933 Homo sapiens miR-4420
gucacugaugucuguagcugag

SEQ ID NO: 1022 - RNA, 22 nt, Artificial sequence
  >hsa-miR-4421 MIMAT0018934 Homo sapiens miR-4421
accugucuguggaaaggagcua

SEQ ID NO: 1023 - RNA, 21 nt, Artificial sequence
  >hsa-miR-4422 MIMAT0018935 Homo sapiens miR-4422
aaaagcaucaggaaguaccca

SEQ ID NO: 1024 - RNA, 21 nt, Artificial sequence
  >hsa-miR-4423-3p MIMAT0018936 Homo sapiens miR-4423-3p
auaggcaccaaaaagcaacaa

SEQ ID NO: 1025 - RNA, 22 nt, Artificial sequence
  >hsa-miR-4423-5p MIMAT0019232 Homo sapiens miR-4423-5p
aguugccuuuuuguucccaugc

SEQ ID NO: 1026 - RNA, 22 nt, Artificial sequence
  >hsa-miR-4424 MIMAT0018939 Homo sapiens miR-4424
agaguuaacucaaaauggacua

SEQ ID NO: 1027 - RNA, 22 nt, Artificial sequence
  >hsa-miR-4425 MIMAT0018940 Homo sapiens miR-4425
uguugggauucagcaggaccau

SEQ ID NO: 1028 - RNA, 17 nt, Artificial sequence
  >hsa-miR-4426 MIMAT0018941 Homo sapiens miR-4426
gaagauggacguacuuu

SEQ ID NO: 1029 - RNA, 21 nt, Artificial sequence
  >hsa-miR-4427 MIMAT0018942 Homo sapiens miR-4427
ucugaauagagucugaagagu

SEQ ID NO: 1030 - RNA, 22 nt, Artificial sequence
  >hsa-miR-4428 MIMAT0018943 Homo sapiens miR-4428
caaggagacgggaacauggagc

SEQ ID NO: 1031 - RNA, 20 nt, Artificial sequence
  >hsa-miR-4429 MIMAT0018944 Homo sapiens miR-4429
aaaagcugggcugagaggcg

SEQ ID NO: 1032 - RNA, 18 nt, Artificial sequence
  >hsa-miR-4430 MIMAT0018945 Homo sapiens miR-4430
aggcuggagugagcggag

SEQ ID NO: 1033 - RNA, 22 nt, Artificial sequence
  >hsa-miR-4431 MIMAT0018947 Homo sapiens miR-4431
gcgacucugaaaacuagaaggu

SEQ ID NO: 1034 - RNA, 20 nt, Artificial sequence
  >hsa-miR-4432 MIMAT0018948 Homo sapiens miR-4432
aaagacucugcaagaugccu

SEQ ID NO: 1035 - RNA, 21 nt, Artificial sequence
  >hsa-miR-4433a-3p MIMAT0018949 Homo sapiens miR-4433a-3p
acaggagugggggugggacau

SEQ ID NO: 1036 - RNA, 21 nt, Artificial sequence
  >hsa-miR-4433a-5p MIMAT0020956 Homo sapiens miR-4433a-5p
cgucccaccccccacuccugu

SEQ ID NO: 1037 - RNA, 21 nt, Artificial sequence
  >hsa-miR-4433b-3p MIMAT0030414 Homo sapiens miR-4433b-3p
caggaguggggggugggacgu

SEQ ID NO: 1038 - RNA, 21 nt, Artificial sequence
  >hsa-miR-4433b-5p MIMAT0030413 Homo sapiens miR-4433b-5p
augucccacccccacuccugu

SEQ ID NO: 1039 - RNA, 18 nt, Artificial sequence
  >hsa-miR-4434 MIMAT0018950 Homo sapiens miR-4434
aggagaaguaaaguagaa

SEQ ID NO: 1040 - RNA, 22 nt, Artificial sequence
  >hsa-miR-4435 MIMAT0018951 Homo sapiens miR-4435
auggccagagcucacacagagg

SEQ ID NO: 1041 - RNA, 21 nt, Artificial sequence
  >hsa-miR-4436a MIMAT0018952 Homo sapiens miR-4436a
gcaggacaggcagaaguggau

SEQ ID NO: 1042 - RNA, 22 nt, Artificial sequence
  >hsa-miR-4436b-3p MIMAT0019941 Homo sapiens miR-4436b-3p
cagggcaggaagaaguggacaa

SEQ ID NO: 1043 - RNA, 22 nt, Artificial sequence
  >hsa-miR-4436b-5p MIMAT0019940 Homo sapiens miR-4436b-5p
guccacuucugccugcccugcc

SEQ ID NO: 1044 - RNA, 21 nt, Artificial sequence
  >hsa-miR-4437 MIMAT0018953 Homo sapiens miR-4437
ugggcucaggguacaaagguu

SEQ ID NO: 1045 - RNA, 21 nt, Artificial sequence
  >hsa-miR-4438 MIMAT0018956 Homo sapiens miR-4438
cacaggcuuagaaaagacagu

SEQ ID NO: 1046 - RNA, 22 nt, Artificial sequence
  >hsa-miR-4439 MIMAT0018957 Homo sapiens miR-4439
gugacugauaccuuggaggcau

SEQ ID NO: 1047 - RNA, 22 nt, Artificial sequence
  >hsa-miR-4440 MIMAT0018958 Homo sapiens miR-4440
ugucguggggcuugcuggcuug

SEQ ID NO: 1048 - RNA, 17 nt, Artificial sequence
  >hsa-miR-4441 MIMAT0018959 Homo sapiens miR-4441
acagggaggagauugua

SEQ ID NO: 1049 - RNA, 17 nt, Artificial sequence
  >hsa-miR-4442 MIMAT0018960 Homo sapiens miR-4442
gccggacaagagggagg

SEQ ID NO: 1050 - RNA, 17 nt, Artificial sequence
  >hsa-miR-4443 MIMAT0018961 Homo sapiens miR-4443
uuggaggcguggguuuu

SEQ ID NO: 1051 - RNA, 18 nt, Artificial sequence
  >hsa-miR-4444 MIMAT0018962 Homo sapiens miR-4444
cucgaguuggaagaggcg

SEQ ID NO: 1052 - RNA, 21 nt, Artificial sequence
  >hsa-miR-4445-3p MIMAT0018964 Homo sapiens miR-4445-3p
cacggcaaaagaaacaaucca

SEQ ID NO: 1053 - RNA, 22 nt, Artificial sequence
  >hsa-miR-4445-5p MIMAT0018963 Homo sapiens miR-4445-5p
agauuguuucuuuugccgugca

SEQ ID NO: 1054 - RNA, 22 nt, Artificial sequence
  >hsa-miR-4446-3p MIMAT0018965 Homo sapiens miR-4446-3p
cagggcuggcagugacaugggu

SEQ ID NO: 1055 - RNA, 22 nt, Artificial sequence
  >hsa-miR-4446-5p MIMAT0019233 Homo sapiens miR-4446-5p
auuucccugccauucccuuggc

SEQ ID NO: 1056 - RNA, 17 nt, Artificial sequence
  >hsa-miR-4447 MIMAT0018966 Homo sapiens miR-4447
ggugggggcuguuguuu

SEQ ID NO: 1057 - RNA, 20 nt, Artificial sequence
  >hsa-miR-4448 MIMAT0018967 Homo sapiens miR-4448
ggcuccuuggucuaggggua

SEQ ID NO: 1058 - RNA, 22 nt, Artificial sequence
  >hsa-miR-4449 MIMAT0018968 Homo sapiens miR-4449
cgucccggggcugcgcgaggca

SEQ ID NO: 1059 - RNA, 22 nt, Artificial sequence
  >hsa-miR-4450 MIMAT0018971 Homo sapiens miR-4450
uggggauuuggagaagugguga

SEQ ID NO: 1060 - RNA, 17 nt, Artificial sequence
  >hsa-miR-4451 MIMAT0018973 Homo sapiens miR-4451
ugguagagcugaggaca

SEQ ID NO: 1061 - RNA, 23 nt, Artificial sequence
  >hsa-miR-4452 MIMAT0018974 Homo sapiens miR-4452
uugaauucuuggccuuaagugau

SEQ ID NO: 1062 - RNA, 20 nt, Artificial sequence
  >hsa-miR-4453 MIMAT0018975 Homo sapiens miR-4453
gagcuuggucuguagcgguu

SEQ ID NO: 1063 - RNA, 20 nt, Artificial sequence
  >hsa-miR-4454 MIMAT0018976 Homo sapiens miR-4454
ggauccgagucacggcacca

SEQ ID NO: 1064 - RNA, 17 nt, Artificial sequence
  >hsa-miR-4455 MIMAT0018977 Homo sapiens miR-4455
aggguguguguguuuuu

SEQ ID NO: 1065 - RNA, 17 nt, Artificial sequence
  >hsa-miR-4456 MIMAT0018978 Homo sapiens miR-4456
ccugguggcuuccuuuu

SEQ ID NO: 1066 - RNA, 22 nt, Artificial sequence
  >hsa-miR-4457 MIMAT0018979 Homo sapiens miR-4457
ucacaagguauugacuggcgua

SEQ ID NO: 1067 - RNA, 19 nt, Artificial sequence
  >hsa-miR-4458 MIMAT0018980 Homo sapiens miR-4458
agagguagguguggaagaa

SEQ ID NO: 1068 - RNA, 22 nt, Artificial sequence
  >hsa-miR-4459 MIMAT0018981 Homo sapiens miR-4459
ccaggaggcggaggagguggag

SEQ ID NO: 1069 - RNA, 22 nt, Artificial sequence
  >hsa-miR-4460 MIMAT0018982 Homo sapiens miR-4460
auagugguugugaauuuaccuu

SEQ ID NO: 1070 - RNA, 23 nt, Artificial sequence
  >hsa-miR-4461 MIMAT0018983 Homo sapiens miR-4461
gauugagacuaguagggcuaggc

SEQ ID NO: 1071 - RNA, 23 nt, Artificial sequence
  >hsa-miR-4462 MIMAT0018986 Homo sapiens miR-4462
ugacacggaggguggcuugggaa

SEQ ID NO: 1072 - RNA, 17 nt, Artificial sequence
  >hsa-miR-4463 MIMAT0018987 Homo sapiens miR-4463
gagacugggguggggcc

SEQ ID NO: 1073 - RNA, 21 nt, Artificial sequence
  >hsa-miR-4464 MIMAT0018988 Homo sapiens miR-4464
aagguuuggauagaugcaaua

SEQ ID NO: 1074 - RNA, 22 nt, Artificial sequence
  >hsa-miR-4465 MIMAT0018992 Homo sapiens miR-4465
cucaaguagucugaccagggga

SEQ ID NO: 1075 - RNA, 18 nt, Artificial sequence
  >hsa-miR-4466 MIMAT0018993 Homo sapiens miR-4466
gggugcgggccggcgggg

SEQ ID NO: 1076 - RNA, 22 nt, Artificial sequence
  >hsa-miR-4467 MIMAT0018994 Homo sapiens miR-4467
uggcggcgguaguuaugggcuu

SEQ ID NO: 1077 - RNA, 18 nt, Artificial sequence
  >hsa-miR-4468 MIMAT0018995 Homo sapiens miR-4468
agagcagaaggaugagau

SEQ ID NO: 1078 - RNA, 22 nt, Artificial sequence
  >hsa-miR-4469 MIMAT0018996 Homo sapiens miR-4469
gcucccucuagggucgcucgga

SEQ ID NO: 1079 - RNA, 21 nt, Artificial sequence
  >hsa-miR-4470 MIMAT0018997 Homo sapiens miR-4470
uggcaaacguggaagccgaga

SEQ ID NO: 1080 - RNA, 22 nt, Artificial sequence
  >hsa-miR-4471 MIMAT0018998 Homo sapiens miR-4471
ugggaacuuaguagagguuuaa

SEQ ID NO: 1081 - RNA, 18 nt, Artificial sequence
  >hsa-miR-4472 MIMAT0018999 Homo sapiens miR-4472
ggugggggguguuguuuu

SEQ ID NO: 1082 - RNA, 22 nt, Artificial sequence
  >hsa-miR-4473 MIMAT0019000 Homo sapiens miR-4473
cuagugcucuccguuacaagua

SEQ ID NO: 1083 - RNA, 22 nt, Artificial sequence
  >hsa-miR-4474-3p MIMAT0019001 Homo sapiens miR-4474-3p
uuguggcuggucaugaggcuaa

SEQ ID NO: 1084 - RNA, 21 nt, Artificial sequence
  >hsa-miR-4474-5p MIMAT0019234 Homo sapiens miR-4474-5p
uuagucucaugaucagacaca

SEQ ID NO: 1085 - RNA, 22 nt, Artificial sequence
  >hsa-miR-4475 MIMAT0019002 Homo sapiens miR-4475
caagggaccaagcauucauuau

SEQ ID NO: 1086 - RNA, 22 nt, Artificial sequence
  >hsa-miR-4476 MIMAT0019003 Homo sapiens miR-4476
caggaaggauuuagggacaggc

SEQ ID NO: 1087 - RNA, 22 nt, Artificial sequence
  >hsa-miR-4477a MIMAT0019004 Homo sapiens miR-4477a
cuauuaaggacauuugugauuc

SEQ ID NO: 1088 - RNA, 22 nt, Artificial sequence
  >hsa-miR-4477b MIMAT0019005 Homo sapiens miR-4477b
auuaaggacauuugugauugau

SEQ ID NO: 1089 - RNA, 17 nt, Artificial sequence
  >hsa-miR-4478 MIMAT0019006 Homo sapiens miR-4478
gaggcugagcugaggag

SEQ ID NO: 1090 - RNA, 22 nt, Artificial sequence
  >hsa-miR-4479 MIMAT0019011 Homo sapiens miR-4479
cgcgcggccgugcucggagcag

SEQ ID NO: 1091 - RNA, 22 nt, Artificial sequence
  >hsa-miR-448 MIMAT0001532 Homo sapiens miR-448
uugcauauguaggaugucccau

SEQ ID NO: 1092 - RNA, 21 nt, Artificial sequence
  >hsa-miR-4480 MIMAT0019014 Homo sapiens miR-4480
agccaaguggaaguuacuuua

SEQ ID NO: 1093 - RNA, 17 nt, Artificial sequence
  >hsa-miR-4481 MIMAT0019015 Homo sapiens miR-4481
ggagugggcuggugguu

SEQ ID NO: 1094 - RNA, 22 nt, Artificial sequence
  >hsa-miR-4482-3p MIMAT0020958 Homo sapiens miR-4482-3p
uuucuauuucucaguggggcuc

SEQ ID NO: 1095 - RNA, 22 nt, Artificial sequence
  >hsa-miR-4482-5p MIMAT0019016 Homo sapiens miR-4482-5p
aacccagugggcuauggaaaug

SEQ ID NO: 1096 - RNA, 17 nt, Artificial sequence
  >hsa-miR-4483 MIMAT0019017 Homo sapiens miR-4483
gggguggucuguuguug

SEQ ID NO: 1097 - RNA, 20 nt, Artificial sequence
  >hsa-miR-4484 MIMAT0019018 Homo sapiens miR-4484
aaaaggcgggagaagcccca

SEQ ID NO: 1098 - RNA, 20 nt, Artificial sequence
  >hsa-miR-4485-3p MIMAT0019019 Homo sapiens miR-4485-3p
uaacggccgcgguacccuaa

SEQ ID NO: 1099 - RNA, 16 nt, Artificial sequence
  >hsa-miR-4485-5p MIMAT0032116 Homo sapiens miR-4485-5p
accgccugcccaguga

SEQ ID NO: 1100 - RNA, 17 nt, Artificial sequence
  >hsa-miR-4486 MIMAT0019020 Homo sapiens miR-4486
gcugggcgaggcuggca

SEQ ID NO: 1101 - RNA, 19 nt, Artificial sequence
  >hsa-miR-4487 MIMAT0019021 Homo sapiens miR-4487
agagcuggcugaagggcag

SEQ ID NO: 1102 - RNA, 18 nt, Artificial sequence
  >hsa-miR-4488 MIMAT0019022 Homo sapiens miR-4488
agggggcgggcuccggcg

SEQ ID NO: 1103 - RNA, 21 nt, Artificial sequence
  >hsa-miR-4489 MIMAT0019023 Homo sapiens miR-4489
uggggcuagugaugcaggacg

SEQ ID NO: 1104 - RNA, 22 nt, Artificial sequence
  >hsa-miR-4490 MIMAT0019025 Homo sapiens miR-4490
ucugguaagagauuugggcaua

SEQ ID NO: 1105 - RNA, 22 nt, Artificial sequence
  >hsa-miR-4491 MIMAT0019026 Homo sapiens miR-4491
aauguggacuggugugaccaaa

SEQ ID NO: 1106 - RNA, 17 nt, Artificial sequence
  >hsa-miR-4492 MIMAT0019027 Homo sapiens miR-4492
ggggcugggcgcgcgcc

SEQ ID NO: 1107 - RNA, 21 nt, Artificial sequence
  >hsa-miR-4493 MIMAT0019028 Homo sapiens miR-4493
agaaggccuuuccaucucugu

SEQ ID NO: 1108 - RNA, 22 nt, Artificial sequence
  >hsa-miR-4494 MIMAT0019029 Homo sapiens miR-4494
ccagacuguggcugaccagagg

SEQ ID NO: 1109 - RNA, 21 nt, Artificial sequence
  >hsa-miR-4495 MIMAT0019030 Homo sapiens miR-4495
aauguaaacaggcuuuuugcu

SEQ ID NO: 1110 - RNA, 22 nt, Artificial sequence
  >hsa-miR-4496 MIMAT0019031 Homo sapiens miR-4496
gaggaaacugaagcugagaggg

SEQ ID NO: 1111 - RNA, 17 nt, Artificial sequence
  >hsa-miR-4497 MIMAT0019032 Homo sapiens miR-4497
cuccgggacggcugggc

SEQ ID NO: 1112 - RNA, 22 nt, Artificial sequence
  >hsa-miR-4498 MIMAT0019033 Homo sapiens miR-4498
ugggcuggcagggcaagugcug

SEQ ID NO: 1113 - RNA, 17 nt, Artificial sequence
  >hsa-miR-4499 MIMAT0019035 Homo sapiens miR-4499
aagacugagaggaggga

SEQ ID NO: 1114 - RNA, 22 nt, Artificial sequence
  >hsa-miR-449a MIMAT0001541 Homo sapiens miR-449a
uggcaguguauuguuagcuggu

SEQ ID NO: 1115 - RNA, 22 nt, Artificial sequence
  >hsa-miR-449b-3p MIMAT0009203 Homo sapiens miR-449b-3p
cagccacaacuacccugccacu

SEQ ID NO: 1116 - RNA, 22 nt, Artificial sequence
  >hsa-miR-449b-5p MIMAT0003327 Homo sapiens miR-449b-5p
aggcaguguauuguuagcuggc

SEQ ID NO: 1117 - RNA, 23 nt, Artificial sequence
  >hsa-miR-449c-3p MIMAT0013771 Homo sapiens miR-449c-3p
uugcuaguugcacuccucucugu

SEQ ID NO: 1118 - RNA, 25 nt, Artificial sequence
  >hsa-miR-449c-5p MIMAT0010251 Homo sapiens miR-449c-5p
uaggcaguguauugcuagcggcugu

SEQ ID NO: 1119 - RNA, 17 nt, Artificial sequence
  >hsa-miR-4500 MIMAT0019036 Homo sapiens miR-4500
ugagguaguaguuucuu

SEQ ID NO: 1120 - RNA, 21 nt, Artificial sequence
  >hsa-miR-4501 MIMAT0019037 Homo sapiens miR-4501
uaugugaccucggaugaauca

SEQ ID NO: 1121 - RNA, 22 nt, Artificial sequence
  >hsa-miR-4502 MIMAT0019038 Homo sapiens miR-4502
gcugaugaugauggugcugaag

SEQ ID NO: 1122 - RNA, 22 nt, Artificial sequence
  >hsa-miR-4503 MIMAT0019039 Homo sapiens miR-4503
uuuaagcaggaaauagaauuua

SEQ ID NO: 1123 - RNA, 22 nt, Artificial sequence
  >hsa-miR-4504 MIMAT0019040 Homo sapiens miR-4504
ugugacaauagagaugaacaug

SEQ ID NO: 1124 - RNA, 18 nt, Artificial sequence
  >hsa-miR-4505 MIMAT0019041 Homo sapiens miR-4505
aggcugggcugggacgga

SEQ ID NO: 1125 - RNA, 20 nt, Artificial sequence
  >hsa-miR-4506 MIMAT0019042 Homo sapiens miR-4506
aaauggguggucugaggcaa

SEQ ID NO: 1126 - RNA, 20 nt, Artificial sequence
  >hsa-miR-4507 MIMAT0019044 Homo sapiens miR-4507
cuggguugggcugggcuggg

SEQ ID NO: 1127 - RNA, 17 nt, Artificial sequence
  >hsa-miR-4508 MIMAT0019045 Homo sapiens miR-4508
gcggggcugggcgcgcg

SEQ ID NO: 1128 - RNA, 22 nt, Artificial sequence
  >hsa-miR-4509 MIMAT0019046 Homo sapiens miR-4509
acuaaaggauauagaagguuuu

SEQ ID NO: 1129 - RNA, 22 nt, Artificial sequence
  >hsa-miR-450a-1-3p MIMAT0022700 Homo sapiens miR-450a-1-3p
auugggaacauuuugcauguau

SEQ ID NO: 1130 - RNA, 22 nt, Artificial sequence
  >hsa-miR-450a-2-3p MIMAT0031074 Homo sapiens miR-450a-2-3p
auuggggacauuuugcauucau

SEQ ID NO: 1131 - RNA, 22 nt, Artificial sequence
  >hsa-miR-450a-5p MIMAT0001545 Homo sapiens miR-450a-5p
uuuugcgauguguuccuaauau

SEQ ID NO: 1132 - RNA, 22 nt, Artificial sequence
  >hsa-miR-450b-3p MIMAT0004910 Homo sapiens miR-450b-3p
uugggaucauuuugcauccaua

SEQ ID NO: 1133 - RNA, 22 nt, Artificial sequence
  >hsa-miR-450b-5p MIMAT0004909 Homo sapiens miR-450b-5p
uuuugcaauauguuccugaaua

SEQ ID NO: 1134 - RNA, 22 nt, Artificial sequence
  >hsa-miR-4510 MIMAT0019047 Homo sapiens miR-4510
ugagggaguaggauguaugguu

SEQ ID NO: 1135 - RNA, 22 nt, Artificial sequence
  >hsa-miR-4511 MIMAT0019048 Homo sapiens miR-4511
gaagaacuguugcauuugcccu

SEQ ID NO: 1136 - RNA, 22 nt, Artificial sequence
  >hsa-miR-4512 MIMAT0019049 Homo sapiens miR-4512
cagggccucacuguaucgccca

SEQ ID NO: 1137 - RNA, 22 nt, Artificial sequence
  >hsa-miR-4513 MIMAT0019050 Homo sapiens miR-4513
agacugacggcuggaggcccau

SEQ ID NO: 1138 - RNA, 18 nt, Artificial sequence
  >hsa-miR-4514 MIMAT0019051 Homo sapiens miR-4514
acaggcaggauuggggaa

SEQ ID NO: 1139 - RNA, 22 nt, Artificial sequence
  >hsa-miR-4515 MIMAT0019052 Homo sapiens miR-4515
aggacuggacucccggcagccc

SEQ ID NO: 1140 - RNA, 17 nt, Artificial sequence
  >hsa-miR-4516 MIMAT0019053 Homo sapiens miR-4516
gggagaagggucggggc

SEQ ID NO: 1141 - RNA, 25 nt, Artificial sequence
  >hsa-miR-4517 MIMAT0019054 Homo sapiens miR-4517
aaauaugaugaaacucacagcugag

SEQ ID NO: 1142 - RNA, 26 nt, Artificial sequence
  >hsa-miR-4518 MIMAT0019055 Homo sapiens miR-4518
gcucagggaugauaacugugcugaga

SEQ ID NO: 1143 - RNA, 18 nt, Artificial sequence
  >hsa-miR-4519 MIMAT0019056 Homo sapiens miR-4519
cagcagugcgcagggcug

SEQ ID NO: 1144 - RNA, 22 nt, Artificial sequence
  >hsa-miR-451a MIMAT0001631 Homo sapiens miR-451a
aaaccguuaccauuacugaguu

SEQ ID NO: 1145 - RNA, 22 nt, Artificial sequence
  >hsa-miR-451b MIMAT0019840 Homo sapiens miR-451b
uagcaagagaaccauuaccauu

SEQ ID NO: 1146 - RNA, 22 nt, Artificial sequence
  >hsa-miR-452-3p MIMAT0001636 Homo sapiens miR-452-3p
cucaucugcaaagaaguaagug

SEQ ID NO: 1147 - RNA, 22 nt, Artificial sequence
  >hsa-miR-452-5p MIMAT0001635 Homo sapiens miR-452-5p
aacuguuugcagaggaaacuga

SEQ ID NO: 1148 - RNA, 22 nt, Artificial sequence
  >hsa-miR-4520-2-3p MIMAT0020300 Homo sapiens miR-4520-2-3p
uuuggacagaaaacacgcaggu

SEQ ID NO: 1149 - RNA, 22 nt, Artificial sequence
  >hsa-miR-4520-3p MIMAT0019057 Homo sapiens miR-4520-3p
uuggacagaaaacacgcaggaa

SEQ ID NO: 1150 - RNA, 20 nt, Artificial sequence
  >hsa-miR-4520-5p MIMAT0019235 Homo sapiens miR-4520-5p
ccugcguguuuucuguccaa

SEQ ID NO: 1151 - RNA, 22 nt, Artificial sequence
  >hsa-miR-4521 MIMAT0019058 Homo sapiens miR-4521
gcuaaggaaguccugugcucag

SEQ ID NO: 1152 - RNA, 21 nt, Artificial sequence
  >hsa-miR-4522 MIMAT0019060 Homo sapiens miR-4522
ugacucugccuguaggccggu

SEQ ID NO: 1153 - RNA, 21 nt, Artificial sequence
  >hsa-miR-4523 MIMAT0019061 Homo sapiens miR-4523
gaccgagagggccucggcugu

SEQ ID NO: 1154 - RNA, 22 nt, Artificial sequence
  >hsa-miR-4524a-3p MIMAT0019063 Homo sapiens miR-4524a-3p
ugagacaggcuuaugcugcuau

SEQ ID NO: 1155 - RNA, 22 nt, Artificial sequence
  >hsa-miR-4524a-5p MIMAT0019062 Homo sapiens miR-4524a-5p
auagcagcaugaaccugucuca

SEQ ID NO: 1156 - RNA, 20 nt, Artificial sequence
  >hsa-miR-4524b-3p MIMAT0022256 Homo sapiens miR-4524b-3p
gagacagguucaugcugcua

SEQ ID NO: 1157 - RNA, 21 nt, Artificial sequence
  >hsa-miR-4524b-5p MIMAT0022255 Homo sapiens miR-4524b-5p
auagcagcauaagccugucuc

SEQ ID NO: 1158 - RNA, 21 nt, Artificial sequence
  >hsa-miR-4525 MIMAT0019064 Homo sapiens miR-4525
ggggggaugugcaugcugguu

SEQ ID NO: 1159 - RNA, 22 nt, Artificial sequence
  >hsa-miR-4526 MIMAT0019065 Homo sapiens miR-4526
gcugacagcagggcuggccgcu

SEQ ID NO: 1160 - RNA, 22 nt, Artificial sequence
  >hsa-miR-4527 MIMAT0019066 Homo sapiens miR-4527
uggucugcaaagagaugacugu

SEQ ID NO: 1161 - RNA, 22 nt, Artificial sequence
  >hsa-miR-4528 MIMAT0019067 Homo sapiens miR-4528
ucauuauauguaugaucuggac

SEQ ID NO: 1162 - RNA, 21 nt, Artificial sequence
  >hsa-miR-4529-3p MIMAT0019068 Homo sapiens miR-4529-3p
auuggacugcugauggcccgu

SEQ ID NO: 1163 - RNA, 22 nt, Artificial sequence
  >hsa-miR-4529-5p MIMAT0019236 Homo sapiens miR-4529-5p
aggccaucagcaguccaaugaa

SEQ ID NO: 1164 - RNA, 18 nt, Artificial sequence
  >hsa-miR-4530 MIMAT0019069 Homo sapiens miR-4530
cccagcaggacgggagcg

SEQ ID NO: 1165 - RNA, 17 nt, Artificial sequence
  >hsa-miR-4531 MIMAT0019070 Homo sapiens miR-4531
auggagaaggcuucuga

SEQ ID NO: 1166 - RNA, 17 nt, Artificial sequence
  >hsa-miR-4532 MIMAT0019071 Homo sapiens miR-4532
ccccggggagcccggcg

SEQ ID NO: 1167 - RNA, 22 nt, Artificial sequence
  >hsa-miR-4533 MIMAT0019072 Homo sapiens miR-4533
uggaaggagguugccggacgcu

SEQ ID NO: 1168 - RNA, 17 nt, Artificial sequence
  >hsa-miR-4534 MIMAT0019073 Homo sapiens miR-4534
ggauggaggaggggucu

SEQ ID NO: 1169 - RNA, 17 nt, Artificial sequence
  >hsa-miR-4535 MIMAT0019075 Homo sapiens miR-4535
guggaccuggcugggac

SEQ ID NO: 1170 - RNA, 21 nt, Artificial sequence
  >hsa-miR-4536-3p MIMAT0020959 Homo sapiens miR-4536-3p
ucgugcauauaucuaccacau

SEQ ID NO: 1171 - RNA, 21 nt, Artificial sequence
  >hsa-miR-4536-5p MIMAT0019078 Homo sapiens miR-4536-5p
ugugguagauauaugcacgau

SEQ ID NO: 1172 - RNA, 22 nt, Artificial sequence
  >hsa-miR-4537 MIMAT0019080 Homo sapiens miR-4537
ugagccgagcugagcuuagcug

SEQ ID NO: 1173 - RNA, 22 nt, Artificial sequence
  >hsa-miR-4538 MIMAT0019081 Homo sapiens miR-4538
gagcuuggaugagcugggcuga

SEQ ID NO: 1174 - RNA, 22 nt, Artificial sequence
  >hsa-miR-4539 MIMAT0019082 Homo sapiens miR-4539
gcugaacugggcugagcugggc

SEQ ID NO: 1175 - RNA, 23 nt, Artificial sequence
  >hsa-miR-454-3p MIMAT0003885 Homo sapiens miR-454-3p
uagugcaauauugcuuauagggu

SEQ ID NO: 1176 - RNA, 22 nt, Artificial sequence
  >hsa-miR-454-5p MIMAT0003884 Homo sapiens miR-454-5p
acccuaucaauauugucucugc

SEQ ID NO: 1177 - RNA, 21 nt, Artificial sequence
  >hsa-miR-4540 MIMAT0019083 Homo sapiens miR-4540
uuaguccugccuguagguuua

SEQ ID NO: 1178 - RNA, 21 nt, Artificial sequence
  >hsa-miR-455-3p MIMAT0004784 Homo sapiens miR-455-3p
gcaguccaugggcauauacac

SEQ ID NO: 1179 - RNA, 22 nt, Artificial sequence
  >hsa-miR-455-5p MIMAT0003150 Homo sapiens miR-455-5p
uaugugccuuuggacuacaucg

SEQ ID NO: 1180 - RNA, 22 nt, Artificial sequence
  >hsa-miR-4632-3p MIMAT0019688 Homo sapiens miR-4632-3p
ugccgcccucucgcugcucuag

SEQ ID NO: 1181 - RNA, 23 nt, Artificial sequence
  >hsa-miR-4632-5p MIMAT0022977 Homo sapiens miR-4632-5p
gagggcagcguggguguggcgga

SEQ ID NO: 1182 - RNA, 22 nt, Artificial sequence
  >hsa-miR-4633-3p MIMAT0019690 Homo sapiens miR-4633-3p
aggagcuagccaggcauaugca

SEQ ID NO: 1183 - RNA, 20 nt, Artificial sequence
  >hsa-miR-4633-5p MIMAT0019689 Homo sapiens miR-4633-5p
auaugccuggcuagcuccuc

SEQ ID NO: 1184 - RNA, 19 nt, Artificial sequence
  >hsa-miR-4634 MIMAT0019691 Homo sapiens miR-4634
cggcgcgaccggcccgggg

SEQ ID NO: 1185 - RNA, 21 nt, Artificial sequence
  >hsa-miR-4635 MIMAT0019692 Homo sapiens miR-4635
ucuugaagucagaacccgcaa

SEQ ID NO: 1186 - RNA, 22 nt, Artificial sequence
  >hsa-miR-4636 MIMAT0019693 Homo sapiens miR-4636
aacucguguucaaagccuuuag

SEQ ID NO: 1187 - RNA, 22 nt, Artificial sequence
  >hsa-miR-4637 MIMAT0019694 Homo sapiens miR-4637
uacuaacugcagauucaaguga

SEQ ID NO: 1188 - RNA, 23 nt, Artificial sequence
  >hsa-miR-4638-3p MIMAT0019696 Homo sapiens miR-4638-3p
ccuggacaccgcucagccggccg

SEQ ID NO: 1189 - RNA, 21 nt, Artificial sequence
  >hsa-miR-4638-5p MIMAT0019695 Homo sapiens miR-4638-5p
acucggcugcgguggacaagu

SEQ ID NO: 1190 - RNA, 20 nt, Artificial sequence
  >hsa-miR-4639-3p MIMAT0019698 Homo sapiens miR-4639-3p
ucacucucaccuugcuuugc

SEQ ID NO: 1191 - RNA, 22 nt, Artificial sequence
  >hsa-miR-4639-5p MIMAT0019697 Homo sapiens miR-4639-5p
uugcuaaguaggcugagauuga

SEQ ID NO: 1192 - RNA, 22 nt, Artificial sequence
  >hsa-miR-4640-3p MIMAT0019700 Homo sapiens miR-4640-3p
cacccccuguuuccuggcccac

SEQ ID NO: 1193 - RNA, 23 nt, Artificial sequence
  >hsa-miR-4640-5p MIMAT0019699 Homo sapiens miR-4640-5p
ugggccagggagcagcugguggg

SEQ ID NO: 1194 - RNA, 24 nt, Artificial sequence
  >hsa-miR-4641 MIMAT0019701 Homo sapiens miR-4641
ugcccaugccauacuuuugccuca

SEQ ID NO: 1195 - RNA, 22 nt, Artificial sequence
  >hsa-miR-4642 MIMAT0019702 Homo sapiens miR-4642
auggcaucguccccugguggcu

SEQ ID NO: 1196 - RNA, 22 nt, Artificial sequence
  >hsa-miR-4643 MIMAT0019703 Homo sapiens miR-4643
gacacaugaccauaaaugcuaa

SEQ ID NO: 1197 - RNA, 23 nt, Artificial sequence
  >hsa-miR-4644 MIMAT0019704 Homo sapiens miR-4644
uggagagagaaaagagacagaag

SEQ ID NO: 1198 - RNA, 22 nt, Artificial sequence
  >hsa-miR-4645-3p MIMAT0019706 Homo sapiens miR-4645-3p
agacaguaguucuugccugguu

SEQ ID NO: 1199 - RNA, 19 nt, Artificial sequence
  >hsa-miR-4645-5p MIMAT0019705 Homo sapiens miR-4645-5p
accaggcaagaaauauugu

SEQ ID NO: 1200 - RNA, 21 nt, Artificial sequence
  >hsa-miR-4646-3p MIMAT0019708 Homo sapiens miR-4646-3p
auugucccucucccuucccag

SEQ ID NO: 1201 - RNA, 22 nt, Artificial sequence
  >hsa-miR-4646-5p MIMAT0019707 Homo sapiens miR-4646-5p
acugggaagaggagcugaggga

SEQ ID NO: 1202 - RNA, 23 nt, Artificial sequence
  >hsa-miR-4647 MIMAT0019709 Homo sapiens miR-4647
gaagauggugcugugcugaggaa

SEQ ID NO: 1203 - RNA, 20 nt, Artificial sequence
  >hsa-miR-4648 MIMAT0019710 Homo sapiens miR-4648
ugugggacugcaaaugggag

SEQ ID NO: 1204 - RNA, 21 nt, Artificial sequence
  >hsa-miR-4649-3p MIMAT0019712 Homo sapiens miR-4649-3p
ucugaggccugccucucccca

SEQ ID NO: 1205 - RNA, 24 nt, Artificial sequence
  >hsa-miR-4649-5p MIMAT0019711 Homo sapiens miR-4649-5p
ugggcgaggggugggcucucagag

SEQ ID NO: 1206 - RNA, 21 nt, Artificial sequence
  >hsa-miR-4650-3p MIMAT0019714 Homo sapiens miR-4650-3p
agguagaaugaggccugacau

SEQ ID NO: 1207 - RNA, 19 nt, Artificial sequence
  >hsa-miR-4650-5p MIMAT0019713 Homo sapiens miR-4650-5p
ucaggccucuuucuaccuu

SEQ ID NO: 1208 - RNA, 20 nt, Artificial sequence
  >hsa-miR-4651 MIMAT0019715 Homo sapiens miR-4651
cggggugggugaggucgggc

SEQ ID NO: 1209 - RNA, 22 nt, Artificial sequence
  >hsa-miR-4652-3p MIMAT0019717 Homo sapiens miR-4652-3p
guucuguuaacccauccccuca

SEQ ID NO: 1210 - RNA, 22 nt, Artificial sequence
  >hsa-miR-4652-5p MIMAT0019716 Homo sapiens miR-4652-5p
aggggacugguuaauagaacua

SEQ ID NO: 1211 - RNA, 23 nt, Artificial sequence
  >hsa-miR-4653-3p MIMAT0019719 Homo sapiens miR-4653-3p
uggaguuaaggguugcuuggaga

SEQ ID NO: 1212 - RNA, 22 nt, Artificial sequence
  >hsa-miR-4653-5p MIMAT0019718 Homo sapiens miR-4653-5p
ucucugagcaaggcuuaacacc

SEQ ID NO: 1213 - RNA, 22 nt, Artificial sequence
  >hsa-miR-4654 MIMAT0019720 Homo sapiens miR-4654
ugugggaucuggaggcaucugg

SEQ ID NO: 1214 - RNA, 21 nt, Artificial sequence
  >hsa-miR-4655-3p MIMAT0019722 Homo sapiens miR-4655-3p
acccucgucagguccccgggg

SEQ ID NO: 1215 - RNA, 22 nt, Artificial sequence
  >hsa-miR-4655-5p MIMAT0019721 Homo sapiens miR-4655-5p
caccggggauggcagagggucg

SEQ ID NO: 1216 - RNA, 23 nt, Artificial sequence
  >hsa-miR-4656 MIMAT0019723 Homo sapiens miR-4656
ugggcugagggcaggaggccugu

SEQ ID NO: 1217 - RNA, 23 nt, Artificial sequence
  >hsa-miR-4657 MIMAT0019724 Homo sapiens miR-4657
aauguggaaguggucugaggcau

SEQ ID NO: 1218 - RNA, 23 nt, Artificial sequence
  >hsa-miR-4658 MIMAT0019725 Homo sapiens miR-4658
gugaguguggauccuggaggaau

SEQ ID NO: 1219 - RNA, 22 nt, Artificial sequence
  >hsa-miR-4659a-3p MIMAT0019727 Homo sapiens miR-4659a-3p
uuucuucuuagacauggcaacg

SEQ ID NO: 1220 - RNA, 22 nt, Artificial sequence
  >hsa-miR-4659a-5p MIMAT0019726 Homo sapiens miR-4659a-5p
cugccaugucuaagaagaaaac

SEQ ID NO: 1221 - RNA, 22 nt, Artificial sequence
  >hsa-miR-4659b-3p MIMAT0019734 Homo sapiens miR-4659b-3p
uuucuucuuagacauggcagcu

SEQ ID NO: 1222 - RNA, 19 nt, Artificial sequence
  >hsa-miR-4659b-5p MIMAT0019733 Homo sapiens miR-4659b-5p
uugccaugucuaagaagaa

SEQ ID NO: 1223 - RNA, 23 nt, Artificial sequence
  >hsa-miR-466 MIMAT0015002 Homo sapiens miR-466
auacacauacacgcaacacacau

SEQ ID NO: 1224 - RNA, 23 nt, Artificial sequence
  >hsa-miR-4660 MIMAT0019728 Homo sapiens miR-4660
ugcagcucugguggaaaauggag

SEQ ID NO: 1225 - RNA, 22 nt, Artificial sequence
  >hsa-miR-4661-3p MIMAT0019730 Homo sapiens miR-4661-3p
caggauccacagagcuagucca

SEQ ID NO: 1226 - RNA, 22 nt, Artificial sequence
  >hsa-miR-4661-5p MIMAT0019729 Homo sapiens miR-4661-5p
aacuagcucuguggauccugac

SEQ ID NO: 1227 - RNA, 22 nt, Artificial sequence
  >hsa-miR-4662a-3p MIMAT0019732 Homo sapiens miR-4662a-3p
aaagauagacaauuggcuaaau

SEQ ID NO: 1228 - RNA, 22 nt, Artificial sequence
  >hsa-miR-4662a-5p MIMAT0019731 Homo sapiens miR-4662a-5p
uuagccaauuguccaucuuuag

SEQ ID NO: 1229 - RNA, 22 nt, Artificial sequence
  >hsa-miR-4662b MIMAT0019736 Homo sapiens miR-4662b
aaagauggacaauuggcuaaau

SEQ ID NO: 1230 - RNA, 24 nt, Artificial sequence
  >hsa-miR-4663 MIMAT0019735 Homo sapiens miR-4663
agcugagcuccauggacgugcagu

SEQ ID NO: 1231 - RNA, 22 nt, Artificial sequence
  >hsa-miR-4664-3p MIMAT0019738 Homo sapiens miR-4664-3p
cuuccggucugugagccccguc

SEQ ID NO: 1232 - RNA, 22 nt, Artificial sequence
  >hsa-miR-4664-5p MIMAT0019737 Homo sapiens miR-4664-5p
uggggugcccacuccgcaaguu

SEQ ID NO: 1233 - RNA, 26 nt, Artificial sequence
  >hsa-miR-4665-3p MIMAT0019740 Homo sapiens miR-4665-3p
cucggccgcggcgcguagcccccgcc

SEQ ID NO: 1234 - RNA, 23 nt, Artificial sequence
  >hsa-miR-4665-5p MIMAT0019739 Homo sapiens miR-4665-5p
cugggggacgcgugagcgcgagc

SEQ ID NO: 1235 - RNA, 21 nt, Artificial sequence
  >hsa-miR-4666a-3p MIMAT0019742 Homo sapiens miR-4666a-3p
cauacaaucugacauguauuu

SEQ ID NO: 1236 - RNA, 21 nt, Artificial sequence
  >hsa-miR-4666a-5p MIMAT0019741 Homo sapiens miR-4666a-5p
auacaugucagauuguaugcc

SEQ ID NO: 1237 - RNA, 23 nt, Artificial sequence
  >hsa-miR-4666b MIMAT0022485 Homo sapiens miR-4666b
uugcaugucagauuguaauuccc

SEQ ID NO: 1238 - RNA, 21 nt, Artificial sequence
  >hsa-miR-4667-3p MIMAT0019744 Homo sapiens miR-4667-3p
ucccuccuucuguccccacag

SEQ ID NO: 1239 - RNA, 22 nt, Artificial sequence
  >hsa-miR-4667-5p MIMAT0019743 Homo sapiens miR-4667-5p
acuggggagcagaaggagaacc

SEQ ID NO: 1240 - RNA, 23 nt, Artificial sequence
  >hsa-miR-4668-3p MIMAT0019746 Homo sapiens miR-4668-3p
gaaaauccuuuuuguuuuuccag

SEQ ID NO: 1241 - RNA, 23 nt, Artificial sequence
  >hsa-miR-4668-5p MIMAT0019745 Homo sapiens miR-4668-5p
agggaaaaaaaaaaggauuuguc

SEQ ID NO: 1242 - RNA, 22 nt, Artificial sequence
  >hsa-miR-4669 MIMAT0019749 Homo sapiens miR-4669
uguguccgggaaguggaggagg

SEQ ID NO: 1243 - RNA, 22 nt, Artificial sequence
  >hsa-miR-4670-3p MIMAT0019751 Homo sapiens miR-4670-3p
ugaaguuacaucauggucgcuu

SEQ ID NO: 1244 - RNA, 22 nt, Artificial sequence
  >hsa-miR-4670-5p MIMAT0019750 Homo sapiens miR-4670-5p
aagcgaccaugauguaacuuca

SEQ ID NO: 1245 - RNA, 21 nt, Artificial sequence
  >hsa-miR-4671-3p MIMAT0019753 Homo sapiens miR-4671-3p
uuagugcauagucuuuggucu

SEQ ID NO: 1246 - RNA, 22 nt, Artificial sequence
  >hsa-miR-4671-5p MIMAT0019752 Homo sapiens miR-4671-5p
accgaagacugugcgcuaaucu

SEQ ID NO: 1247 - RNA, 21 nt, Artificial sequence
  >hsa-miR-4672 MIMAT0019754 Homo sapiens miR-4672
uuacacagcuggacagaggca

SEQ ID NO: 1248 - RNA, 22 nt, Artificial sequence
  >hsa-miR-4673 MIMAT0019755 Homo sapiens miR-4673
uccaggcaggagccggacugga

SEQ ID NO: 1249 - RNA, 21 nt, Artificial sequence
  >hsa-miR-4674 MIMAT0019756 Homo sapiens miR-4674
cugggcucgggacgcgcggcu

SEQ ID NO: 1250 - RNA, 22 nt, Artificial sequence
  >hsa-miR-4675 MIMAT0019757 Homo sapiens miR-4675
ggggcugugauugaccagcagg

SEQ ID NO: 1251 - RNA, 22 nt, Artificial sequence
  >hsa-miR-4676-3p MIMAT0019759 Homo sapiens miR-4676-3p
cacuguuucaccacuggcucuu

SEQ ID NO: 1252 - RNA, 21 nt, Artificial sequence
  >hsa-miR-4676-5p MIMAT0019758 Homo sapiens miR-4676-5p
gagccaguggugagacaguga

SEQ ID NO: 1253 - RNA, 22 nt, Artificial sequence
  >hsa-miR-4677-3p MIMAT0019761 Homo sapiens miR-4677-3p
ucugugagaccaaagaacuacu

SEQ ID NO: 1254 - RNA, 22 nt, Artificial sequence
  >hsa-miR-4677-5p MIMAT0019760 Homo sapiens miR-4677-5p
uuguucuuuggucuuucagcca

SEQ ID NO: 1255 - RNA, 22 nt, Artificial sequence
  >hsa-miR-4678 MIMAT0019762 Homo sapiens miR-4678
aagguauuguucagacuuauga

SEQ ID NO: 1256 - RNA, 22 nt, Artificial sequence
  >hsa-miR-4679 MIMAT0019763 Homo sapiens miR-4679
ucugugauagagauucuuugcu

SEQ ID NO: 1257 - RNA, 21 nt, Artificial sequence
  >hsa-miR-4680-3p MIMAT0019765 Homo sapiens miR-4680-3p
ucugaauuguaagaguuguua

SEQ ID NO: 1258 - RNA, 23 nt, Artificial sequence
  >hsa-miR-4680-5p MIMAT0019764 Homo sapiens miR-4680-5p
agaacucuugcagucuuagaugu

SEQ ID NO: 1259 - RNA, 22 nt, Artificial sequence
  >hsa-miR-4681 MIMAT0019766 Homo sapiens miR-4681
aacgggaaugcaggcuguaucu

SEQ ID NO: 1260 - RNA, 23 nt, Artificial sequence
  >hsa-miR-4682 MIMAT0019767 Homo sapiens miR-4682
ucugaguuccuggagccuggucu

SEQ ID NO: 1261 - RNA, 23 nt, Artificial sequence
  >hsa-miR-4683 MIMAT0019768 Homo sapiens miR-4683
uggagauccagugcucgcccgau

SEQ ID NO: 1262 - RNA, 22 nt, Artificial sequence
  >hsa-miR-4684-3p MIMAT0019770 Homo sapiens miR-4684-3p
uguugcaagucgguggagacgu

SEQ ID NO: 1263 - RNA, 22 nt, Artificial sequence
  >hsa-miR-4684-5p MIMAT0019769 Homo sapiens miR-4684-5p
cucucuacugacuugcaacaua

SEQ ID NO: 1264 - RNA, 22 nt, Artificial sequence
  >hsa-miR-4685-3p MIMAT0019772 Homo sapiens miR-4685-3p
ucucccuuccugcccuggcuag

SEQ ID NO: 1265 - RNA, 26 nt, Artificial sequence
  >hsa-miR-4685-5p MIMAT0019771 Homo sapiens miR-4685-5p
cccagggcuuggaguggggcaagguu

SEQ ID NO: 1266 - RNA, 23 nt, Artificial sequence
  >hsa-miR-4686 MIMAT0019773 Homo sapiens miR-4686
uaucugcugggcuuucugguguu

SEQ ID NO: 1267 - RNA, 21 nt, Artificial sequence
  >hsa-miR-4687-3p MIMAT0019775 Homo sapiens miR-4687-3p
uggcuguuggagggggcaggc

SEQ ID NO: 1268 - RNA, 22 nt, Artificial sequence
  >hsa-miR-4687-5p MIMAT0019774 Homo sapiens miR-4687-5p
cagcccuccucccgcacccaaa

SEQ ID NO: 1269 - RNA, 22 nt, Artificial sequence
  >hsa-miR-4688 MIMAT0019777 Homo sapiens miR-4688
uaggggcagcagaggaccuggg

SEQ ID NO: 1270 - RNA, 22 nt, Artificial sequence
  >hsa-miR-4689 MIMAT0019778 Homo sapiens miR-4689
uugaggagacauggugggggcc

SEQ ID NO: 1271 - RNA, 21 nt, Artificial sequence
  >hsa-miR-4690-3p MIMAT0019780 Homo sapiens miR-4690-3p
gcagcccagcugaggccucug

SEQ ID NO: 1272 - RNA, 22 nt, Artificial sequence
  >hsa-miR-4690-5p MIMAT0019779 Homo sapiens miR-4690-5p
gagcaggcgaggcugggcugaa

SEQ ID NO: 1273 - RNA, 23 nt, Artificial sequence
  >hsa-miR-4691-3p MIMAT0019782 Homo sapiens miR-4691-3p
ccagccacggacugagagugcau

SEQ ID NO: 1274 - RNA, 23 nt, Artificial sequence
  >hsa-miR-4691-5p MIMAT0019781 Homo sapiens miR-4691-5p
guccuccaggccaugagcugcgg

SEQ ID NO: 1275 - RNA, 22 nt, Artificial sequence
  >hsa-miR-4692 MIMAT0019783 Homo sapiens miR-4692
ucaggcaguguggguaucagau

SEQ ID NO: 1276 - RNA, 23 nt, Artificial sequence
  >hsa-miR-4693-3p MIMAT0019785 Homo sapiens miR-4693-3p
ugagaguggaauucacaguauuu

SEQ ID NO: 1277 - RNA, 23 nt, Artificial sequence
  >hsa-miR-4693-5p MIMAT0019784 Homo sapiens miR-4693-5p
auacugugaauuucacugucaca

SEQ ID NO: 1278 - RNA, 21 nt, Artificial sequence
  >hsa-miR-4694-3p MIMAT0019787 Homo sapiens miR-4694-3p
caaauggacaggauaacaccu

SEQ ID NO: 1279 - RNA, 22 nt, Artificial sequence
  >hsa-miR-4694-5p MIMAT0019786 Homo sapiens miR-4694-5p
agguguuauccuauccauuugc

SEQ ID NO: 1280 - RNA, 22 nt, Artificial sequence
  >hsa-miR-4695-3p MIMAT0019789 Homo sapiens miR-4695-3p
ugaucucaccgcugccuccuuc

SEQ ID NO: 1281 - RNA, 22 nt, Artificial sequence
  >hsa-miR-4695-5p MIMAT0019788 Homo sapiens miR-4695-5p
caggaggcagugggcgagcagg

SEQ ID NO: 1282 - RNA, 22 nt, Artificial sequence
  >hsa-miR-4696 MIMAT0019790 Homo sapiens miR-4696
ugcaagacggauacugucaucu

SEQ ID NO: 1283 - RNA, 24 nt, Artificial sequence
  >hsa-miR-4697-3p MIMAT0019792 Homo sapiens miR-4697-3p
ugucagugacuccugccccuuggu

SEQ ID NO: 1284 - RNA, 22 nt, Artificial sequence
  >hsa-miR-4697-5p MIMAT0019791 Homo sapiens miR-4697-5p
agggggcgcagucacugacgug

SEQ ID NO: 1285 - RNA, 23 nt, Artificial sequence
  >hsa-miR-4698 MIMAT0019793 Homo sapiens miR-4698
ucaaaauguagaggaagacccca

SEQ ID NO: 1286 - RNA, 22 nt, Artificial sequence
  >hsa-miR-4699-3p MIMAT0019795 Homo sapiens miR-4699-3p
aauuuacucugcaaucuucucc

SEQ ID NO: 1287 - RNA, 22 nt, Artificial sequence
  >hsa-miR-4699-5p MIMAT0019794 Homo sapiens miR-4699-5p
agaagauugcagaguaaguucc

SEQ ID NO: 1288 - RNA, 26 nt, Artificial sequence
  >hsa-miR-4700-3p MIMAT0019797 Homo sapiens miR-4700-3p
cacaggacugacuccucaccccagug

SEQ ID NO: 1289 - RNA, 22 nt, Artificial sequence
  >hsa-miR-4700-5p MIMAT0019796 Homo sapiens miR-4700-5p
ucuggggaugaggacagugugu

SEQ ID NO: 1290 - RNA, 20 nt, Artificial sequence
  >hsa-miR-4701-3p MIMAT0019799 Homo sapiens miR-4701-3p
augggugauggguguggugu

SEQ ID NO: 1291 - RNA, 22 nt, Artificial sequence
  >hsa-miR-4701-5p MIMAT0019798 Homo sapiens miR-4701-5p
uuggccaccacaccuaccccuu

SEQ ID NO: 1292 - RNA, 22 nt, Artificial sequence
  >hsa-miR-4703-3p MIMAT0019802 Homo sapiens miR-4703-3p
uguaguuguauuguauugccac

SEQ ID NO: 1293 - RNA, 23 nt, Artificial sequence
  >hsa-miR-4703-5p MIMAT0019801 Homo sapiens miR-4703-5p
uagcaauacaguacaaauauagu

SEQ ID NO: 1294 - RNA, 22 nt, Artificial sequence
  >hsa-miR-4704-3p MIMAT0019804 Homo sapiens miR-4704-3p
ucagucacauaucuagugucua

SEQ ID NO: 1295 - RNA, 22 nt, Artificial sequence
  >hsa-miR-4704-5p MIMAT0019803 Homo sapiens miR-4704-5p
gacacuaggcaugugagugauu

SEQ ID NO: 1296 - RNA, 22 nt, Artificial sequence
  >hsa-miR-4705 MIMAT0019805 Homo sapiens miR-4705
ucaaucacuugguaauugcugu

SEQ ID NO: 1297 - RNA, 25 nt, Artificial sequence
  >hsa-miR-4706 MIMAT0019806 Homo sapiens miR-4706
agcggggaggaagugggcgcugcuu

SEQ ID NO: 1298 - RNA, 22 nt, Artificial sequence
  >hsa-miR-4707-3p MIMAT0019808 Homo sapiens miR-4707-3p
agcccgccccagccgagguucu

SEQ ID NO: 1299 - RNA, 23 nt, Artificial sequence
  >hsa-miR-4707-5p MIMAT0019807 Homo sapiens miR-4707-5p
gccccggcgcgggcggguucugg

SEQ ID NO: 1300 - RNA, 22 nt, Artificial sequence
  >hsa-miR-4708-3p MIMAT0019810 Homo sapiens miR-4708-3p
agcaaggcggcaucucucugau

SEQ ID NO: 1301 - RNA, 21 nt, Artificial sequence
  >hsa-miR-4708-5p MIMAT0019809 Homo sapiens miR-4708-5p
agagaugccgccuugcuccuu

SEQ ID NO: 1302 - RNA, 23 nt, Artificial sequence
  >hsa-miR-4709-3p MIMAT0019812 Homo sapiens miR-4709-3p
uugaagaggaggugcucuguagc

SEQ ID NO: 1303 - RNA, 22 nt, Artificial sequence
  >hsa-miR-4709-5p MIMAT0019811 Homo sapiens miR-4709-5p
acaacagugacuugcucuccaa

SEQ ID NO: 1304 - RNA, 18 nt, Artificial sequence
  >hsa-miR-4710 MIMAT0019815 Homo sapiens miR-4710
gggugagggcaggugguu

SEQ ID NO: 1305 - RNA, 18 nt, Artificial sequence
  >hsa-miR-4711-3p MIMAT0019817 Homo sapiens miR-4711-3p
cgugucuucuggcuugau

SEQ ID NO: 1306 - RNA, 23 nt, Artificial sequence
  >hsa-miR-4711-5p MIMAT0019816 Homo sapiens miR-4711-5p
ugcaucaggccagaagacaugag

SEQ ID NO: 1307 - RNA, 21 nt, Artificial sequence
  >hsa-miR-4712-3p MIMAT0019819 Homo sapiens miR-4712-3p
aaugagagaccuguacuguau

SEQ ID NO: 1308 - RNA, 22 nt, Artificial sequence
  >hsa-miR-4712-5p MIMAT0019818 Homo sapiens miR-4712-5p
uccaguacaggucucucauuuc

SEQ ID NO: 1309 - RNA, 22 nt, Artificial sequence
  >hsa-miR-4713-3p MIMAT0019821 Homo sapiens miR-4713-3p
ugggauccagacagugggagaa

SEQ ID NO: 1310 - RNA, 22 nt, Artificial sequence
  >hsa-miR-4713-5p MIMAT0019820 Homo sapiens miR-4713-5p
uucucccacuaccaggcuccca

SEQ ID NO: 1311 - RNA, 22 nt, Artificial sequence
  >hsa-miR-4714-3p MIMAT0019823 Homo sapiens miR-4714-3p
ccaaccuagguggucagaguug

SEQ ID NO: 1312 - RNA, 22 nt, Artificial sequence
  >hsa-miR-4714-5p MIMAT0019822 Homo sapiens miR-4714-5p
aacucugaccccuuagguugau

SEQ ID NO: 1313 - RNA, 23 nt, Artificial sequence
  >hsa-miR-4715-3p MIMAT0019825 Homo sapiens miR-4715-3p
gugccaccuuaacugcagccaau

SEQ ID NO: 1314 - RNA, 22 nt, Artificial sequence
  >hsa-miR-4715-5p MIMAT0019824 Homo sapiens miR-4715-5p
aaguuggcugcaguuaaggugg

SEQ ID NO: 1315 - RNA, 22 nt, Artificial sequence
  >hsa-miR-4716-3p MIMAT0019827 Homo sapiens miR-4716-3p
aagggggaaggaaacauggaga

SEQ ID NO: 1316 - RNA, 22 nt, Artificial sequence
  >hsa-miR-4716-5p MIMAT0019826 Homo sapiens miR-4716-5p
uccauguuuccuucccccuucu

SEQ ID NO: 1317 - RNA, 21 nt, Artificial sequence
  >hsa-miR-4717-3p MIMAT0019830 Homo sapiens miR-4717-3p
acacauggguggcuguggccu

SEQ ID NO: 1318 - RNA, 22 nt, Artificial sequence
  >hsa-miR-4717-5p MIMAT0019829 Homo sapiens miR-4717-5p
uaggccacagccacccaugugu

SEQ ID NO: 1319 - RNA, 21 nt, Artificial sequence
  >hsa-miR-4718 MIMAT0019831 Homo sapiens miR-4718
agcuguaccugaaaccaagca

SEQ ID NO: 1320 - RNA, 22 nt, Artificial sequence
  >hsa-miR-4719 MIMAT0019832 Homo sapiens miR-4719
ucacaaaucuauaauaugcagg

SEQ ID NO: 1321 - RNA, 21 nt, Artificial sequence
  >hsa-miR-4720-3p MIMAT0019834 Homo sapiens miR-4720-3p
ugcuuaaguuguaccaaguau

SEQ ID NO: 1322 - RNA, 22 nt, Artificial sequence
  >hsa-miR-4720-5p MIMAT0019833 Homo sapiens miR-4720-5p
ccuggcauauuugguauaacuu

SEQ ID NO: 1323 - RNA, 22 nt, Artificial sequence
  >hsa-miR-4721 MIMAT0019835 Homo sapiens miR-4721
ugagggcuccaggugacggugg

SEQ ID NO: 1324 - RNA, 22 nt, Artificial sequence
  >hsa-miR-4722-3p MIMAT0019837 Homo sapiens miR-4722-3p
accugccagcaccucccugcag

SEQ ID NO: 1325 - RNA, 23 nt, Artificial sequence
  >hsa-miR-4722-5p MIMAT0019836 Homo sapiens miR-4722-5p
ggcaggagggcugugccagguug

SEQ ID NO: 1326 - RNA, 22 nt, Artificial sequence
  >hsa-miR-4723-3p MIMAT0019839 Homo sapiens miR-4723-3p
cccucucuggcuccuccccaaa

SEQ ID NO: 1327 - RNA, 24 nt, Artificial sequence
  >hsa-miR-4723-5p MIMAT0019838 Homo sapiens miR-4723-5p
ugggggagccaugagauaagagca

SEQ ID NO: 1328 - RNA, 21 nt, Artificial sequence
  >hsa-miR-4724-3p MIMAT0019842 Homo sapiens miR-4724-3p
guaccuucugguucagcuagu

SEQ ID NO: 1329 - RNA, 23 nt, Artificial sequence
  >hsa-miR-4724-5p MIMAT0019841 Homo sapiens miR-4724-5p
aacugaaccaggagugagcuucg

SEQ ID NO: 1330 - RNA, 22 nt, Artificial sequence
  >hsa-miR-4725-3p MIMAT0019844 Homo sapiens miR-4725-3p
uggggaaggcgucagugucggg

SEQ ID NO: 1331 - RNA, 21 nt, Artificial sequence
  >hsa-miR-4725-5p MIMAT0019843 Homo sapiens miR-4725-5p
agacccugcagccuucccacc

SEQ ID NO: 1332 - RNA, 22 nt, Artificial sequence
  >hsa-miR-4726-3p MIMAT0019846 Homo sapiens miR-4726-3p
acccagguucccucuggccgca

SEQ ID NO: 1333 - RNA, 23 nt, Artificial sequence
  >hsa-miR-4726-5p MIMAT0019845 Homo sapiens miR-4726-5p
agggccagaggagccuggagugg

SEQ ID NO: 1334 - RNA, 22 nt, Artificial sequence
  >hsa-miR-4727-3p MIMAT0019848 Homo sapiens miR-4727-3p
auagugggaagcuggcagauuc

SEQ ID NO: 1335 - RNA, 21 nt, Artificial sequence
  >hsa-miR-4727-5p MIMAT0019847 Homo sapiens miR-4727-5p
aucugccagcuuccacagugg

SEQ ID NO: 1336 - RNA, 25 nt, Artificial sequence
  >hsa-miR-4728-3p MIMAT0019850 Homo sapiens miR-4728-3p
caugcugaccucccuccugccccag

SEQ ID NO: 1337 - RNA, 23 nt, Artificial sequence
  >hsa-miR-4728-5p MIMAT0019849 Homo sapiens miR-4728-5p
ugggaggggagaggcagcaagca

SEQ ID NO: 1338 - RNA, 22 nt, Artificial sequence
  >hsa-miR-4729 MIMAT0019851 Homo sapiens miR-4729
ucauuuaucuguugggaagcua

SEQ ID NO: 1339 - RNA, 23 nt, Artificial sequence
  >hsa-miR-4730 MIMAT0019852 Homo sapiens miR-4730
cuggcggagcccauuccaugcca

SEQ ID NO: 1340 - RNA, 22 nt, Artificial sequence
  >hsa-miR-4731-3p MIMAT0019854 Homo sapiens miR-4731-3p
cacacaaguggcccccaacacu

SEQ ID NO: 1341 - RNA, 22 nt, Artificial sequence
  >hsa-miR-4731-5p MIMAT0019853 Homo sapiens miR-4731-5p
ugcugggggccacaugagugug

SEQ ID NO: 1342 - RNA, 21 nt, Artificial sequence
  >hsa-miR-4732-3p MIMAT0019856 Homo sapiens miR-4732-3p
gcccugaccuguccuguucug

SEQ ID NO: 1343 - RNA, 23 nt, Artificial sequence
  >hsa-miR-4732-5p MIMAT0019855 Homo sapiens miR-4732-5p
uguagagcagggagcaggaagcu

SEQ ID NO: 1344 - RNA, 22 nt, Artificial sequence
  >hsa-miR-4733-3p MIMAT0019858 Homo sapiens miR-4733-3p
ccaccaggucuagcauugggau

SEQ ID NO: 1345 - RNA, 22 nt, Artificial sequence
  >hsa-miR-4733-5p MIMAT0019857 Homo sapiens miR-4733-5p
aaucccaaugcuagacccggug

SEQ ID NO: 1346 - RNA, 22 nt, Artificial sequence
  >hsa-miR-4734 MIMAT0019859 Homo sapiens miR-4734
gcugcgggcugcggucagggcg

SEQ ID NO: 1347 - RNA, 21 nt, Artificial sequence
  >hsa-miR-4735-3p MIMAT0019861 Homo sapiens miR-4735-3p
aaaggugcucaaauuagacau

SEQ ID NO: 1348 - RNA, 22 nt, Artificial sequence
  >hsa-miR-4735-5p MIMAT0019860 Homo sapiens miR-4735-5p
ccuaauuugaacaccuucggua

SEQ ID NO: 1349 - RNA, 19 nt, Artificial sequence
  >hsa-miR-4736 MIMAT0019862 Homo sapiens miR-4736
aggcagguuaucugggcug

SEQ ID NO: 1350 - RNA, 20 nt, Artificial sequence
  >hsa-miR-4737 MIMAT0019863 Homo sapiens miR-4737
augcgaggaugcugacagug

SEQ ID NO: 1351 - RNA, 22 nt, Artificial sequence
  >hsa-miR-4738-3p MIMAT0019867 Homo sapiens miR-4738-3p
ugaaacuggagcgccuggagga

SEQ ID NO: 1352 - RNA, 22 nt, Artificial sequence
  >hsa-miR-4738-5p MIMAT0019866 Homo sapiens miR-4738-5p
accagcgcguuuucaguuucau

SEQ ID NO: 1353 - RNA, 25 nt, Artificial sequence
  >hsa-miR-4739 MIMAT0019868 Homo sapiens miR-4739
aagggaggaggagcggaggggcccu

SEQ ID NO: 1354 - RNA, 22 nt, Artificial sequence
  >hsa-miR-4740-3p MIMAT0019870 Homo sapiens miR-4740-3p
gcccgagaggauccgucccugc

SEQ ID NO: 1355 - RNA, 22 nt, Artificial sequence
  >hsa-miR-4740-5p MIMAT0019869 Homo sapiens miR-4740-5p
aggacugauccucucgggcagg

SEQ ID NO: 1356 - RNA, 23 nt, Artificial sequence
  >hsa-miR-4741 MIMAT0019871 Homo sapiens miR-4741
cgggcuguccggaggggucggcu

SEQ ID NO: 1357 - RNA, 23 nt, Artificial sequence
  >hsa-miR-4742-3p MIMAT0019873 Homo sapiens miR-4742-3p
ucuguauucuccuuugccugcag

SEQ ID NO: 1358 - RNA, 23 nt, Artificial sequence
  >hsa-miR-4742-5p MIMAT0019872 Homo sapiens miR-4742-5p
ucaggcaaagggauauuuacaga

SEQ ID NO: 1359 - RNA, 21 nt, Artificial sequence
  >hsa-miR-4743-3p MIMAT0022978 Homo sapiens miR-4743-3p
uuucugucuuuucugguccag

SEQ ID NO: 1360 - RNA, 23 nt, Artificial sequence
  >hsa-miR-4743-5p MIMAT0019874 Homo sapiens miR-4743-5p
uggccggaugggacaggaggcau

SEQ ID NO: 1361 - RNA, 23 nt, Artificial sequence
  >hsa-miR-4744 MIMAT0019875 Homo sapiens miR-4744
ucuaaagacuagacuucgcuaug

SEQ ID NO: 1362 - RNA, 23 nt, Artificial sequence
  >hsa-miR-4745-3p MIMAT0019879 Homo sapiens miR-4745-3p
uggcccggcgacgucucacgguc

SEQ ID NO: 1363 - RNA, 23 nt, Artificial sequence
  >hsa-miR-4745-5p MIMAT0019878 Homo sapiens miR-4745-5p
ugaguggggcucccgggacggcg

SEQ ID NO: 1364 - RNA, 21 nt, Artificial sequence
  >hsa-miR-4746-3p MIMAT0019881 Homo sapiens miR-4746-3p
agcggugcuccugcgggccga

SEQ ID NO: 1365 - RNA, 23 nt, Artificial sequence
  >hsa-miR-4746-5p MIMAT0019880 Homo sapiens miR-4746-5p
ccggucccaggagaaccugcaga

SEQ ID NO: 1366 - RNA, 22 nt, Artificial sequence
  >hsa-miR-4747-3p MIMAT0019883 Homo sapiens miR-4747-3p
aaggcccgggcuuuccucccag

SEQ ID NO: 1367 - RNA, 22 nt, Artificial sequence
  >hsa-miR-4747-5p MIMAT0019882 Homo sapiens miR-4747-5p
agggaaggaggcuuggucuuag

SEQ ID NO: 1368 - RNA, 21 nt, Artificial sequence
  >hsa-miR-4748 MIMAT0019884 Homo sapiens miR-4748
gagguuuggggaggauuugcu

SEQ ID NO: 1369 - RNA, 20 nt, Artificial sequence
  >hsa-miR-4749-3p MIMAT0019886 Homo sapiens miR-4749-3p
cgccccuccugcccccacag

SEQ ID NO: 1370 - RNA, 22 nt, Artificial sequence
  >hsa-miR-4749-5p MIMAT0019885 Homo sapiens miR-4749-5p
ugcggggacaggccagggcauc

SEQ ID NO: 1371 - RNA, 22 nt, Artificial sequence
  >hsa-miR-4750-3p MIMAT0022979 Homo sapiens miR-4750-3p
ccugacccacccccucccgcag

SEQ ID NO: 1372 - RNA, 22 nt, Artificial sequence
  >hsa-miR-4750-5p MIMAT0019887 Homo sapiens miR-4750-5p
cucgggcggaggugguugagug

SEQ ID NO: 1373 - RNA, 24 nt, Artificial sequence
  >hsa-miR-4751 MIMAT0019888 Homo sapiens miR-4751
agaggacccguagcugcuagaagg

SEQ ID NO: 1374 - RNA, 22 nt, Artificial sequence
  >hsa-miR-4752 MIMAT0019889 Homo sapiens miR-4752
uuguggaucucaaggaugugcu

SEQ ID NO: 1375 - RNA, 22 nt, Artificial sequence
  >hsa-miR-4753-3p MIMAT0019891 Homo sapiens miR-4753-3p
uucucuuucuuuagccuugugu

SEQ ID NO: 1376 - RNA, 22 nt, Artificial sequence
  >hsa-miR-4753-5p MIMAT0019890 Homo sapiens miR-4753-5p
caaggccaaaggaagagaacag

SEQ ID NO: 1377 - RNA, 23 nt, Artificial sequence
  >hsa-miR-4754 MIMAT0019894 Homo sapiens miR-4754
augcggaccuggguuagcggagu

SEQ ID NO: 1378 - RNA, 22 nt, Artificial sequence
  >hsa-miR-4755-3p MIMAT0019896 Homo sapiens miR-4755-3p
agccaggcucugaagggaaagu

SEQ ID NO: 1379 - RNA, 22 nt, Artificial sequence
  >hsa-miR-4755-5p MIMAT0019895 Homo sapiens miR-4755-5p
uuucccuucagagccuggcuuu

SEQ ID NO: 1380 - RNA, 22 nt, Artificial sequence
  >hsa-miR-4756-3p MIMAT0019900 Homo sapiens miR-4756-3p
ccagagaugguugccuuccuau

SEQ ID NO: 1381 - RNA, 23 nt, Artificial sequence
  >hsa-miR-4756-5p MIMAT0019899 Homo sapiens miR-4756-5p
cagggaggcgcucacucucugcu

SEQ ID NO: 1382 - RNA, 22 nt, Artificial sequence
  >hsa-miR-4757-3p MIMAT0019902 Homo sapiens miR-4757-3p
caugacgucacagaggcuucgc

SEQ ID NO: 1383 - RNA, 23 nt, Artificial sequence
  >hsa-miR-4757-5p MIMAT0019901 Homo sapiens miR-4757-5p
aggccucugugacgucacggugu

SEQ ID NO: 1384 - RNA, 23 nt, Artificial sequence
  >hsa-miR-4758-3p MIMAT0019904 Homo sapiens miR-4758-3p
ugccccaccugcugaccacccuc

SEQ ID NO: 1385 - RNA, 23 nt, Artificial sequence
  >hsa-miR-4758-5p MIMAT0019903 Homo sapiens miR-4758-5p
gugagugggagccgguggggcug

SEQ ID NO: 1386 - RNA, 21 nt, Artificial sequence
  >hsa-miR-4759 MIMAT0019905 Homo sapiens miR-4759
uaggacuagauguuggaauua

SEQ ID NO: 1387 - RNA, 22 nt, Artificial sequence
  >hsa-miR-4760-3p MIMAT0019907 Homo sapiens miR-4760-3p
aaauucauguucaaucuaaacc

SEQ ID NO: 1388 - RNA, 22 nt, Artificial sequence
  >hsa-miR-4760-5p MIMAT0019906 Homo sapiens miR-4760-5p
uuuagauugaacaugaaguuag

SEQ ID NO: 1389 - RNA, 21 nt, Artificial sequence
  >hsa-miR-4761-3p MIMAT0019909 Homo sapiens miR-4761-3p
gagggcaugcgcacuuugucc

SEQ ID NO: 1390 - RNA, 21 nt, Artificial sequence
  >hsa-miR-4761-5p MIMAT0019908 Homo sapiens miR-4761-5p
acaaggugugcaugccugacc

SEQ ID NO: 1391 - RNA, 22 nt, Artificial sequence
  >hsa-miR-4762-3p MIMAT0019911 Homo sapiens miR-4762-3p
cuucugaucaagauuuguggug

SEQ ID NO: 1392 - RNA, 21 nt, Artificial sequence
  >hsa-miR-4762-5p MIMAT0019910 Homo sapiens miR-4762-5p
ccaaaucuugaucagaagccu

SEQ ID NO: 1393 - RNA, 24 nt, Artificial sequence
  >hsa-miR-4763-3p MIMAT0019913 Homo sapiens miR-4763-3p
aggcaggggcuggugcugggcggg

SEQ ID NO: 1394 - RNA, 21 nt, Artificial sequence
  >hsa-miR-4763-5p MIMAT0019912 Homo sapiens miR-4763-5p
cgccugcccagcccuccugcu

SEQ ID NO: 1395 - RNA, 22 nt, Artificial sequence
  >hsa-miR-4764-3p MIMAT0019915 Homo sapiens miR-4764-3p
uuaacuccuuucacacccaugg

SEQ ID NO: 1396 - RNA, 21 nt, Artificial sequence
  >hsa-miR-4764-5p MIMAT0019914 Homo sapiens miR-4764-5p
uggauguggaaggaguuaucu

SEQ ID NO: 1397 - RNA, 22 nt, Artificial sequence
  >hsa-miR-4765 MIMAT0019916 Homo sapiens miR-4765
ugagugauugauagcuauguuc

SEQ ID NO: 1398 - RNA, 21 nt, Artificial sequence
  >hsa-miR-4766-3p MIMAT0019918 Homo sapiens miR-4766-3p
auagcaauugcucuuuuggaa

SEQ ID NO: 1399 - RNA, 21 nt, Artificial sequence
  >hsa-miR-4766-5p MIMAT0019917 Homo sapiens miR-4766-5p
ucugaaagagcaguugguguu

SEQ ID NO: 1400 - RNA, 23 nt, Artificial sequence
  >hsa-miR-4767 MIMAT0019919 Homo sapiens miR-4767
cgcgggcgcuccuggccgccgcc

SEQ ID NO: 1401 - RNA, 20 nt, Artificial sequence
  >hsa-miR-4768-3p MIMAT0019921 Homo sapiens miR-4768-3p
ccaggagauccagagagaau

SEQ ID NO: 1402 - RNA, 22 nt, Artificial sequence
  >hsa-miR-4768-5p MIMAT0019920 Homo sapiens miR-4768-5p
auucucucuggaucccauggau

SEQ ID NO: 1403 - RNA, 22 nt, Artificial sequence
  >hsa-miR-4769-3p MIMAT0019923 Homo sapiens miR-4769-3p
ucugccauccucccuccccuac

SEQ ID NO: 1404 - RNA, 24 nt, Artificial sequence
  >hsa-miR-4769-5p MIMAT0019922 Homo sapiens miR-4769-5p
ggugggauggagagaagguaugag

SEQ ID NO: 1405 - RNA, 18 nt, Artificial sequence
  >hsa-miR-4770 MIMAT0019924 Homo sapiens miR-4770
ugagaugacacuguagcu

SEQ ID NO: 1406 - RNA, 21 nt, Artificial sequence
  >hsa-miR-4771 MIMAT0019925 Homo sapiens miR-4771
agcagacuugaccuacaauua

SEQ ID NO: 1407 - RNA, 22 nt, Artificial sequence
  >hsa-miR-4772-3p MIMAT0019927 Homo sapiens miR-4772-3p
ccugcaacuuugccugaucaga

SEQ ID NO: 1408 - RNA, 22 nt, Artificial sequence
  >hsa-miR-4772-5p MIMAT0019926 Homo sapiens miR-4772-5p
ugaucaggcaaaauugcagacu

SEQ ID NO: 1409 - RNA, 22 nt, Artificial sequence
  >hsa-miR-4773 MIMAT0019928 Homo sapiens miR-4773
cagaacaggagcauagaaaggc

SEQ ID NO: 1410 - RNA, 21 nt, Artificial sequence
  >hsa-miR-4774-3p MIMAT0019930 Homo sapiens miR-4774-3p
auugccuaacaugugccagaa

SEQ ID NO: 1411 - RNA, 22 nt, Artificial sequence
  >hsa-miR-4774-5p MIMAT0019929 Homo sapiens miR-4774-5p
ucugguauguaguagguaauaa

SEQ ID NO: 1412 - RNA, 22 nt, Artificial sequence
  >hsa-miR-4775 MIMAT0019931 Homo sapiens miR-4775
uuaauuuuuuguuucggucacu

SEQ ID NO: 1413 - RNA, 23 nt, Artificial sequence
  >hsa-miR-4776-3p MIMAT0019933 Homo sapiens miR-4776-3p
cuugccauccugguccacugcau

SEQ ID NO: 1414 - RNA, 22 nt, Artificial sequence
  >hsa-miR-4776-5p MIMAT0019932 Homo sapiens miR-4776-5p
guggaccaggauggcaagggcu

SEQ ID NO: 1415 - RNA, 22 nt, Artificial sequence
  >hsa-miR-4777-3p MIMAT0019935 Homo sapiens miR-4777-3p
auaccucaucuagaaugcugua

SEQ ID NO: 1416 - RNA, 22 nt, Artificial sequence
  >hsa-miR-4777-5p MIMAT0019934 Homo sapiens miR-4777-5p
uucuagaugagagauauauaua

SEQ ID NO: 1417 - RNA, 22 nt, Artificial sequence
  >hsa-miR-4778-3p MIMAT0019937 Homo sapiens miR-4778-3p
ucuucuuccuuugcagaguuga

SEQ ID NO: 1418 - RNA, 22 nt, Artificial sequence
  >hsa-miR-4778-5p MIMAT0019936 Homo sapiens miR-4778-5p
aauucuguaaaggaagaagagg

SEQ ID NO: 1419 - RNA, 22 nt, Artificial sequence
  >hsa-miR-4779 MIMAT0019938 Homo sapiens miR-4779
uaggagggaauaguaaaagcag

SEQ ID NO: 1420 - RNA, 22 nt, Artificial sequence
  >hsa-miR-4780 MIMAT0019939 Homo sapiens miR-4780
acccuugagccugaucccuagc

SEQ ID NO: 1421 - RNA, 22 nt, Artificial sequence
  >hsa-miR-4781-3p MIMAT0019943 Homo sapiens miR-4781-3p
aauguuggaauccucgcuagag

SEQ ID NO: 1422 - RNA, 21 nt, Artificial sequence
  >hsa-miR-4781-5p MIMAT0019942 Homo sapiens miR-4781-5p
uagcggggauuccaauauugg

SEQ ID NO: 1423 - RNA, 22 nt, Artificial sequence
  >hsa-miR-4782-3p MIMAT0019945 Homo sapiens miR-4782-3p
ugauugucuucauaucuagaac

SEQ ID NO: 1424 - RNA, 22 nt, Artificial sequence
  >hsa-miR-4782-5p MIMAT0019944 Homo sapiens miR-4782-5p
uucuggauaugaagacaaucaa

SEQ ID NO: 1425 - RNA, 23 nt, Artificial sequence
  >hsa-miR-4783-3p MIMAT0019947 Homo sapiens miR-4783-3p
ccccgguguuggggcgcgucugc

SEQ ID NO: 1426 - RNA, 21 nt, Artificial sequence
  >hsa-miR-4783-5p MIMAT0019946 Homo sapiens miR-4783-5p
ggcgcgcccagcucccgggcu

SEQ ID NO: 1427 - RNA, 20 nt, Artificial sequence
  >hsa-miR-4784 MIMAT0019948 Homo sapiens miR-4784
ugaggagaugcugggacuga

SEQ ID NO: 1428 - RNA, 21 nt, Artificial sequence
  >hsa-miR-4785 MIMAT0019949 Homo sapiens miR-4785
agagucggcgacgccgccagc

SEQ ID NO: 1429 - RNA, 22 nt, Artificial sequence
  >hsa-miR-4786-3p MIMAT0019955 Homo sapiens miR-4786-3p
ugaagccagcucuggucugggc

SEQ ID NO: 1430 - RNA, 22 nt, Artificial sequence
  >hsa-miR-4786-5p MIMAT0019954 Homo sapiens miR-4786-5p
ugagaccaggacuggaugcacc

SEQ ID NO: 1431 - RNA, 24 nt, Artificial sequence
  >hsa-miR-4787-3p MIMAT0019957 Homo sapiens miR-4787-3p
gaugcgccgcccacugccccgcgc

SEQ ID NO: 1432 - RNA, 22 nt, Artificial sequence
  >hsa-miR-4787-5p MIMAT0019956 Homo sapiens miR-4787-5p
gcggggguggcggcggcauccc

SEQ ID NO: 1433 - RNA, 22 nt, Artificial sequence
  >hsa-miR-4788 MIMAT0019958 Homo sapiens miR-4788
uuacggaccagcuaagggaggc

SEQ ID NO: 1434 - RNA, 21 nt, Artificial sequence
  >hsa-miR-4789-3p MIMAT0019960 Homo sapiens miR-4789-3p
cacacauagcagguguauaua

SEQ ID NO: 1435 - RNA, 22 nt, Artificial sequence
  >hsa-miR-4789-5p MIMAT0019959 Homo sapiens miR-4789-5p
guauacaccugauauguguaug

SEQ ID NO: 1436 - RNA, 22 nt, Artificial sequence
  >hsa-miR-4790-3p MIMAT0019962 Homo sapiens miR-4790-3p
ugaaugguaaagcgaugucaca

SEQ ID NO: 1437 - RNA, 20 nt, Artificial sequence
  >hsa-miR-4790-5p MIMAT0019961 Homo sapiens miR-4790-5p
aucgcuuuaccauucauguu

SEQ ID NO: 1438 - RNA, 18 nt, Artificial sequence
  >hsa-miR-4791 MIMAT0019963 Homo sapiens miR-4791
uggauaugaugacugaaa

SEQ ID NO: 1439 - RNA, 18 nt, Artificial sequence
  >hsa-miR-4792 MIMAT0019964 Homo sapiens miR-4792
cggugagcgcucgcuggc

SEQ ID NO: 1440 - RNA, 23 nt, Artificial sequence
  >hsa-miR-4793-3p MIMAT0019966 Homo sapiens miR-4793-3p
ucugcacugugaguuggcuggcu

SEQ ID NO: 1441 - RNA, 24 nt, Artificial sequence
  >hsa-miR-4793-5p MIMAT0019965 Homo sapiens miR-4793-5p
acauccugcuccacagggcagagg

SEQ ID NO: 1442 - RNA, 22 nt, Artificial sequence
  >hsa-miR-4794 MIMAT0019967 Homo sapiens miR-4794
ucuggcuaucucacgagacugu

SEQ ID NO: 1443 - RNA, 22 nt, Artificial sequence
  >hsa-miR-4795-3p MIMAT0019969 Homo sapiens miR-4795-3p
auauuauuagccacuucuggau

SEQ ID NO: 1444 - RNA, 21 nt, Artificial sequence
  >hsa-miR-4795-5p MIMAT0019968 Homo sapiens miR-4795-5p
agaaguggcuaauaauauuga

SEQ ID NO: 1445 - RNA, 22 nt, Artificial sequence
  >hsa-miR-4796-3p MIMAT0019971 Homo sapiens miR-4796-3p
uaaaguggcagaguauagacac

SEQ ID NO: 1446 - RNA, 22 nt, Artificial sequence
  >hsa-miR-4796-5p MIMAT0019970 Homo sapiens miR-4796-5p
ugucuauacucugucacuuuac

SEQ ID NO: 1447 - RNA, 21 nt, Artificial sequence
  >hsa-miR-4797-3p MIMAT0019973 Homo sapiens miR-4797-3p
ucucaguaaguggcacucugu

SEQ ID NO: 1448 - RNA, 21 nt, Artificial sequence
  >hsa-miR-4797-5p MIMAT0019972 Homo sapiens miR-4797-5p
gacagagugccacuuacugaa

SEQ ID NO: 1449 - RNA, 22 nt, Artificial sequence
  >hsa-miR-4798-3p MIMAT0019975 Homo sapiens miR-4798-3p
aacucacgaaguauaccgaagu

SEQ ID NO: 1450 - RNA, 22 nt, Artificial sequence
  >hsa-miR-4798-5p MIMAT0019974 Homo sapiens miR-4798-5p
uucgguauacuuugugaauugg

SEQ ID NO: 1451 - RNA, 22 nt, Artificial sequence
  >hsa-miR-4799-3p MIMAT0019977 Homo sapiens miR-4799-3p
acuggcaugcugcauuuauaua

SEQ ID NO: 1452 - RNA, 22 nt, Artificial sequence
  >hsa-miR-4799-5p MIMAT0019976 Homo sapiens miR-4799-5p
aucuaaaugcagcaugccaguc

SEQ ID NO: 1453 - RNA, 19 nt, Artificial sequence
  >hsa-miR-4800-3p MIMAT0019979 Homo sapiens miR-4800-3p
cauccguccgucuguccac

SEQ ID NO: 1454 - RNA, 21 nt, Artificial sequence
  >hsa-miR-4800-5p MIMAT0019978 Homo sapiens miR-4800-5p
aguggaccgaggaaggaagga

SEQ ID NO: 1455 - RNA, 22 nt, Artificial sequence
  >hsa-miR-4801 MIMAT0019980 Homo sapiens miR-4801
uacacaagaaaaccaaggcuca

SEQ ID NO: 1456 - RNA, 23 nt, Artificial sequence
  >hsa-miR-4802-3p MIMAT0019982 Homo sapiens miR-4802-3p
uacauggauggaaaccuucaagc

SEQ ID NO: 1457 - RNA, 22 nt, Artificial sequence
  >hsa-miR-4802-5p MIMAT0019981 Homo sapiens miR-4802-5p
uauggagguucuagaccauguu

SEQ ID NO: 1458 - RNA, 21 nt, Artificial sequence
  >hsa-miR-4803 MIMAT0019983 Homo sapiens miR-4803
uaacauaauaguguggauuga

SEQ ID NO: 1459 - RNA, 21 nt, Artificial sequence
  >hsa-miR-4804-3p MIMAT0019985 Homo sapiens miR-4804-3p
ugcuuaaccuugcccucgaaa

SEQ ID NO: 1460 - RNA, 21 nt, Artificial sequence
  >hsa-miR-4804-5p MIMAT0019984 Homo sapiens miR-4804-5p
uuggacgguaagguuaagcaa

SEQ ID NO: 1461 - RNA, 21 nt, Artificial sequence
  >hsa-miR-483-3p MIMAT0002173 Homo sapiens miR-483-3p
ucacuccucuccucccgucuu

SEQ ID NO: 1462 - RNA, 22 nt, Artificial sequence
  >hsa-miR-483-5p MIMAT0004761 Homo sapiens miR-483-5p
aagacgggaggaaagaagggag

SEQ ID NO: 1463 - RNA, 22 nt, Artificial sequence
  >hsa-miR-484 MIMAT0002174 Homo sapiens miR-484
ucaggcucaguccccucccgau

SEQ ID NO: 1464 - RNA, 22 nt, Artificial sequence
  >hsa-miR-485-3p MIMAT0002176 Homo sapiens miR-485-3p
gucauacacggcucuccucucu

SEQ ID NO: 1465 - RNA, 22 nt, Artificial sequence
  >hsa-miR-485-5p MIMAT0002175 Homo sapiens miR-485-5p
agaggcuggccgugaugaauuc

SEQ ID NO: 1466 - RNA, 21 nt, Artificial sequence
  >hsa-miR-486-3p MIMAT0004762 Homo sapiens miR-486-3p
cggggcagcucaguacaggau

SEQ ID NO: 1467 - RNA, 22 nt, Artificial sequence
  >hsa-miR-486-5p MIMAT0002177 Homo sapiens miR-486-5p
uccuguacugagcugccccgag

SEQ ID NO: 1468 - RNA, 22 nt, Artificial sequence
  >hsa-miR-487a-3p MIMAT0002178 Homo sapiens miR-487a-3p
aaucauacagggacauccaguu

SEQ ID NO: 1469 - RNA, 22 nt, Artificial sequence
  >hsa-miR-487a-5p MIMAT0026559 Homo sapiens miR-487a-5p
gugguuaucccugcuguguucg

SEQ ID NO: 1470 - RNA, 22 nt, Artificial sequence
  >hsa-miR-487b-3p MIMAT0003180 Homo sapiens miR-487b-3p
aaucguacagggucauccacuu

SEQ ID NO: 1471 - RNA, 22 nt, Artificial sequence
  >hsa-miR-487b-5p MIMAT0026614 Homo sapiens miR-487b-5p
gugguuaucccuguccuguucg

SEQ ID NO: 1472 - RNA, 21 nt, Artificial sequence
  >hsa-miR-488-3p MIMAT0004763 Homo sapiens miR-488-3p
uugaaaggcuauuucuugguc

SEQ ID NO: 1473 - RNA, 21 nt, Artificial sequence
  >hsa-miR-488-5p MIMAT0002804 Homo sapiens miR-488-5p
cccagauaauggcacucucaa

SEQ ID NO: 1474 - RNA, 22 nt, Artificial sequence
  >hsa-miR-489-3p MIMAT0002805 Homo sapiens miR-489-3p
gugacaucacauauacggcagc

SEQ ID NO: 1475 - RNA, 22 nt, Artificial sequence
  >hsa-miR-489-5p MIMAT0026605 Homo sapiens miR-489-5p
ggucguaugugugacgccauuu

SEQ ID NO: 1476 - RNA, 22 nt, Artificial sequence
  >hsa-miR-490-3p MIMAT0002806 Homo sapiens miR-490-3p
caaccuggaggacuccaugcug

SEQ ID NO: 1477 - RNA, 20 nt, Artificial sequence
  >hsa-miR-490-5p MIMAT0004764 Homo sapiens miR-490-5p
ccauggaucuccaggugggu

SEQ ID NO: 1478 - RNA, 22 nt, Artificial sequence
  >hsa-miR-491-3p MIMAT0004765 Homo sapiens miR-491-3p
cuuaugcaagauucccuucuac

SEQ ID NO: 1479 - RNA, 22 nt, Artificial sequence
  >hsa-miR-491-5p MIMAT0002807 Homo sapiens miR-491-5p
aguggggaacccuuccaugagg

SEQ ID NO: 1480 - RNA, 23 nt, Artificial sequence
  >hsa-miR-492 MIMAT0002812 Homo sapiens miR-492
aggaccugcgggacaagauucuu

SEQ ID NO: 1481 - RNA, 22 nt, Artificial sequence
  >hsa-miR-493-3p MIMAT0003161 Homo sapiens miR-493-3p
ugaaggucuacugugugccagg

SEQ ID NO: 1482 - RNA, 22 nt, Artificial sequence
  >hsa-miR-493-5p MIMAT0002813 Homo sapiens miR-493-5p
uuguacaugguaggcuuucauu

SEQ ID NO: 1483 - RNA, 22 nt, Artificial sequence
  >hsa-miR-494-3p MIMAT0002816 Homo sapiens miR-494-3p
ugaaacauacacgggaaaccuc

SEQ ID NO: 1484 - RNA, 23 nt, Artificial sequence
  >hsa-miR-494-5p MIMAT0026607 Homo sapiens miR-494-5p
agguuguccguguugucuucucu

SEQ ID NO: 1485 - RNA, 22 nt, Artificial sequence
  >hsa-miR-495-3p MIMAT0002817 Homo sapiens miR-495-3p
aaacaaacauggugcacuucuu

SEQ ID NO: 1486 - RNA, 22 nt, Artificial sequence
  >hsa-miR-495-5p MIMAT0022924 Homo sapiens miR-495-5p
gaaguugcccauguuauuuucg

SEQ ID NO: 1487 - RNA, 22 nt, Artificial sequence
  >hsa-miR-496 MIMAT0002818 Homo sapiens miR-496
ugaguauuacauggccaaucuc

SEQ ID NO: 1488 - RNA, 22 nt, Artificial sequence
  >hsa-miR-497-3p MIMAT0004768 Homo sapiens miR-497-3p
caaaccacacugugguguuaga

SEQ ID NO: 1489 - RNA, 21 nt, Artificial sequence
  >hsa-miR-497-5p MIMAT0002820 Homo sapiens miR-497-5p
cagcagcacacugugguuugu

SEQ ID NO: 1490 - RNA, 23 nt, Artificial sequence
  >hsa-miR-498 MIMAT0002824 Homo sapiens miR-498
uuucaagccagggggcguuuuuc

SEQ ID NO: 1491 - RNA, 20 nt, Artificial sequence
  >hsa-miR-4999-3p MIMAT0021018 Homo sapiens miR-4999-3p
ucacuaccugacaauacagu

SEQ ID NO: 1492 - RNA, 21 nt, Artificial sequence
  >hsa-miR-4999-5p MIMAT0021017 Homo sapiens miR-4999-5p
ugcuguauugucagguaguga

SEQ ID NO: 1493 - RNA, 22 nt, Artificial sequence
  >hsa-miR-499a-3p MIMAT0004772 Homo sapiens miR-499a-3p
aacaucacagcaagucugugcu

SEQ ID NO: 1494 - RNA, 21 nt, Artificial sequence
  >hsa-miR-499a-5p MIMAT0002870 Homo sapiens miR-499a-5p
uuaagacuugcagugauguuu

SEQ ID NO: 1495 - RNA, 22 nt, Artificial sequence
  >hsa-miR-499b-3p MIMAT0019898 Homo sapiens miR-499b-3p
aacaucacugcaagucuuaaca

SEQ ID NO: 1496 - RNA, 21 nt, Artificial sequence
  >hsa-miR-499b-5p MIMAT0019897 Homo sapiens miR-499b-5p
acagacuugcugugauguuca

SEQ ID NO: 1497 - RNA, 22 nt, Artificial sequence
  >hsa-miR-5000-3p MIMAT0021020 Homo sapiens miR-5000-3p
ucaggacacuucugaacuugga

SEQ ID NO: 1498 - RNA, 22 nt, Artificial sequence
  >hsa-miR-5000-5p MIMAT0021019 Homo sapiens miR-5000-5p
caguucagaaguguuccugagu

SEQ ID NO: 1499 - RNA, 22 nt, Artificial sequence
  >hsa-miR-5001-3p MIMAT0021022 Homo sapiens miR-5001-3p
uucugccucuguccagguccuu

SEQ ID NO: 1500 - RNA, 24 nt, Artificial sequence
  >hsa-miR-5001-5p MIMAT0021021 Homo sapiens miR-5001-5p
agggcuggacucagcggcggagcu

SEQ ID NO: 1501 - RNA, 21 nt, Artificial sequence
  >hsa-miR-5002-3p MIMAT0021024 Homo sapiens miR-5002-3p
ugacugccucacugaccacuu

SEQ ID NO: 1502 - RNA, 24 nt, Artificial sequence
  >hsa-miR-5002-5p MIMAT0021023 Homo sapiens miR-5002-5p
aauuugguuucugaggcacuuagu

SEQ ID NO: 1503 - RNA, 21 nt, Artificial sequence
  >hsa-miR-5003-3p MIMAT0021026 Homo sapiens miR-5003-3p
uacuuuucuagguuguugggg

SEQ ID NO: 1504 - RNA, 23 nt, Artificial sequence
  >hsa-miR-5003-5p MIMAT0021025 Homo sapiens miR-5003-5p
ucacaacaaccuugcaggguaga

SEQ ID NO: 1505 - RNA, 22 nt, Artificial sequence
  >hsa-miR-5004-3p MIMAT0021028 Homo sapiens miR-5004-3p
cuuggauuuuccugggccucag

SEQ ID NO: 1506 - RNA, 22 nt, Artificial sequence
  >hsa-miR-5004-5p MIMAT0021027 Homo sapiens miR-5004-5p
ugaggacagggcaaauucacga

SEQ ID NO: 1507 - RNA, 21 nt, Artificial sequence
  >hsa-miR-5006-3p MIMAT0021034 Homo sapiens miR-5006-3p
uuucccuuuccauccuggcag

SEQ ID NO: 1508 - RNA, 21 nt, Artificial sequence
  >hsa-miR-5006-5p MIMAT0021033 Homo sapiens miR-5006-5p
uugccagggcaggagguggaa

SEQ ID NO: 1509 - RNA, 22 nt, Artificial sequence
  >hsa-miR-5007-3p MIMAT0021036 Homo sapiens miR-5007-3p
aucauaugaaccaaacucuaau

SEQ ID NO: 1510 - RNA, 22 nt, Artificial sequence
  >hsa-miR-5007-5p MIMAT0021035 Homo sapiens miR-5007-5p
uagagucuggcugauaugguuu

SEQ ID NO: 1511 - RNA, 21 nt, Artificial sequence
  >hsa-miR-5008-3p MIMAT0021040 Homo sapiens miR-5008-3p
ccugugcucccagggccucgc

SEQ ID NO: 1512 - RNA, 22 nt, Artificial sequence
  >hsa-miR-5008-5p MIMAT0021039 Homo sapiens miR-5008-5p
ugaggcccuuggggcacagugg

SEQ ID NO: 1513 - RNA, 22 nt, Artificial sequence
  >hsa-miR-5009-3p MIMAT0021042 Homo sapiens miR-5009-3p
uccuaaaucugaaaguccaaaa

SEQ ID NO: 1514 - RNA, 24 nt, Artificial sequence
  >hsa-miR-5009-5p MIMAT0021041 Homo sapiens miR-5009-5p
uuggacuuuuucagauuuggggau

SEQ ID NO: 1515 - RNA, 22 nt, Artificial sequence
  >hsa-miR-500a-3p MIMAT0002871 Homo sapiens miR-500a-3p
augcaccugggcaaggauucug

SEQ ID NO: 1516 - RNA, 23 nt, Artificial sequence
  >hsa-miR-500a-5p MIMAT0004773 Homo sapiens miR-500a-5p
uaauccuugcuaccugggugaga

SEQ ID NO: 1517 - RNA, 20 nt, Artificial sequence
  >hsa-miR-500b-3p MIMAT0027032 Homo sapiens miR-500b-3p
gcacccaggcaaggauucug

SEQ ID NO: 1518 - RNA, 18 nt, Artificial sequence
  >hsa-miR-500b-5p MIMAT0016925 Homo sapiens miR-500b-5p
aauccuugcuaccugggu

SEQ ID NO: 1519 - RNA, 22 nt, Artificial sequence
  >hsa-miR-501-3p MIMAT0004774 Homo sapiens miR-501-3p
aaugcacccgggcaaggauucu

SEQ ID NO: 1520 - RNA, 22 nt, Artificial sequence
  >hsa-miR-501-5p MIMAT0002872 Homo sapiens miR-501-5p
aauccuuugucccugggugaga

SEQ ID NO: 1521 - RNA, 22 nt, Artificial sequence
  >hsa-miR-5010-3p MIMAT0021044 Homo sapiens miR-5010-3p
uuuugugucucccauuccccag

SEQ ID NO: 1522 - RNA, 22 nt, Artificial sequence
  >hsa-miR-5010-5p MIMAT0021043 Homo sapiens miR-5010-5p
agggggauggcagagcaaaauu

SEQ ID NO: 1523 - RNA, 22 nt, Artificial sequence
  >hsa-miR-5011-3p MIMAT0021046 Homo sapiens miR-5011-3p
gugcauggcuguauauauaaca

SEQ ID NO: 1524 - RNA, 21 nt, Artificial sequence
  >hsa-miR-5011-5p MIMAT0021045 Homo sapiens miR-5011-5p
uauauauacagccaugcacuc

SEQ ID NO: 1525 - RNA, 22 nt, Artificial sequence
  >hsa-miR-502-3p MIMAT0004775 Homo sapiens miR-502-3p
aaugcaccugggcaaggauuca

SEQ ID NO: 1526 - RNA, 21 nt, Artificial sequence
  >hsa-miR-502-5p MIMAT0002873 Homo sapiens miR-502-5p
auccuugcuaucugggugcua

SEQ ID NO: 1527 - RNA, 23 nt, Artificial sequence
  >hsa-miR-503-3p MIMAT0022925 Homo sapiens miR-503-3p
gggguauuguuuccgcugccagg

SEQ ID NO: 1528 - RNA, 23 nt, Artificial sequence
  >hsa-miR-503-5p MIMAT0002874 Homo sapiens miR-503-5p
uagcagcgggaacaguucugcag

SEQ ID NO: 1529 - RNA, 21 nt, Artificial sequence
  >hsa-miR-504-3p MIMAT0026612 Homo sapiens miR-504-3p
gggagugcagggcaggguuuc

SEQ ID NO: 1530 - RNA, 22 nt, Artificial sequence
  >hsa-miR-504-5p MIMAT0002875 Homo sapiens miR-504-5p
agacccuggucugcacucuauc

SEQ ID NO: 1531 - RNA, 21 nt, Artificial sequence
  >hsa-miR-5047 MIMAT0020541 Homo sapiens miR-5047
uugcagcugcgguuguaaggu

SEQ ID NO: 1532 - RNA, 22 nt, Artificial sequence
  >hsa-miR-505-3p MIMAT0002876 Homo sapiens miR-505-3p
cgucaacacuugcugguuuccu

SEQ ID NO: 1533 - RNA, 22 nt, Artificial sequence
  >hsa-miR-505-5p MIMAT0004776 Homo sapiens miR-505-5p
gggagccaggaaguauugaugu

SEQ ID NO: 1534 - RNA, 21 nt, Artificial sequence
  >hsa-miR-506-3p MIMAT0002878 Homo sapiens miR-506-3p
uaaggcacccuucugaguaga

SEQ ID NO: 1535 - RNA, 22 nt, Artificial sequence
  >hsa-miR-506-5p MIMAT0022701 Homo sapiens miR-506-5p
uauucaggaagguguuacuuaa

SEQ ID NO: 1536 - RNA, 21 nt, Artificial sequence
  >hsa-miR-507 MIMAT0002879 Homo sapiens miR-507
uuuugcaccuuuuggagugaa

SEQ ID NO: 1537 - RNA, 23 nt, Artificial sequence
  >hsa-miR-508-3p MIMAT0002880 Homo sapiens miR-508-3p
ugauuguagccuuuuggaguaga

SEQ ID NO: 1538 - RNA, 23 nt, Artificial sequence
  >hsa-miR-508-5p MIMAT0004778 Homo sapiens miR-508-5p
uacuccagagggcgucacucaug

SEQ ID NO: 1539 - RNA, 23 nt, Artificial sequence
  >hsa-miR-5087 MIMAT0021079 Homo sapiens miR-5087
ggguuuguagcuuugcuggcaug

SEQ ID NO: 1540 - RNA, 21 nt, Artificial sequence
  >hsa-miR-5088-3p MIMAT0027041 Homo sapiens miR-5088-3p
ucccuucuuccugggcccuca

SEQ ID NO: 1541 - RNA, 24 nt, Artificial sequence
  >hsa-miR-5088-5p MIMAT0021080 Homo sapiens miR-5088-5p
cagggcucagggauuggauggagg

SEQ ID NO: 1542 - RNA, 23 nt, Artificial sequence
  >hsa-miR-5089-3p MIMAT0022984 Homo sapiens miR-5089-3p
augcuacucggaaaucccacuga

SEQ ID NO: 1543 - RNA, 21 nt, Artificial sequence
  >hsa-miR-5089-5p MIMAT0021081 Homo sapiens miR-5089-5p
gugggauuucugaguagcauc

SEQ ID NO: 1544 - RNA, 22 nt, Artificial sequence
  >hsa-miR-509-3-5p MIMAT0004975 Homo sapiens miR-509-3-5p
uacugcagacguggcaaucaug

SEQ ID NO: 1545 - RNA, 22 nt, Artificial sequence
  >hsa-miR-509-3p MIMAT0002881 Homo sapiens miR-509-3p
ugauugguacgucuguggguag

SEQ ID NO: 1546 - RNA, 21 nt, Artificial sequence
  >hsa-miR-509-5p MIMAT0004779 Homo sapiens miR-509-5p
uacugcagacaguggcaauca

SEQ ID NO: 1547 - RNA, 23 nt, Artificial sequence
  >hsa-miR-5090 MIMAT0021082 Homo sapiens miR-5090
ccggggcagauugguguagggug

SEQ ID NO: 1548 - RNA, 23 nt, Artificial sequence
  >hsa-miR-5091 MIMAT0021083 Homo sapiens miR-5091
acggagacgacaagacugugcug

SEQ ID NO: 1549 - RNA, 22 nt, Artificial sequence
  >hsa-miR-5092 MIMAT0021084 Homo sapiens miR-5092
aauccacgcugagcuuggcauc

SEQ ID NO: 1550 - RNA, 23 nt, Artificial sequence
  >hsa-miR-5093 MIMAT0021085 Homo sapiens miR-5093
aggaaaugaggcuggcuaggagc

SEQ ID NO: 1551 - RNA, 22 nt, Artificial sequence
  >hsa-miR-5094 MIMAT0021086 Homo sapiens miR-5094
aaucagugaaugccuugaaccu

SEQ ID NO: 1552 - RNA, 21 nt, Artificial sequence
  >hsa-miR-5095 MIMAT0020600 Homo sapiens miR-5095
uuacaggcgugaaccaccgcg

SEQ ID NO: 1553 - RNA, 21 nt, Artificial sequence
  >hsa-miR-5096 MIMAT0020603 Homo sapiens miR-5096
guuucaccauguuggucaggc

SEQ ID NO: 1554 - RNA, 21 nt, Artificial sequence
  >hsa-miR-510-3p MIMAT0026613 Homo sapiens miR-510-3p
auugaaaccucuaagagugga

SEQ ID NO: 1555 - RNA, 22 nt, Artificial sequence
  >hsa-miR-510-5p MIMAT0002882 Homo sapiens miR-510-5p
uacucaggagaguggcaaucac

SEQ ID NO: 1556 - RNA, 22 nt, Artificial sequence
  >hsa-miR-5100 MIMAT0022259 Homo sapiens miR-5100
uucagaucccagcggugccucu

SEQ ID NO: 1557 - RNA, 20 nt, Artificial sequence
  >hsa-miR-511-3p MIMAT0026606 Homo sapiens miR-511-3p
aauguguagcaaaagacaga

SEQ ID NO: 1558 - RNA, 21 nt, Artificial sequence
  >hsa-miR-511-5p MIMAT0002808 Homo sapiens miR-511-5p
gugucuuuugcucugcaguca

SEQ ID NO: 1559 - RNA, 22 nt, Artificial sequence
  >hsa-miR-512-3p MIMAT0002823 Homo sapiens miR-512-3p
aagugcugucauagcugagguc

SEQ ID NO: 1560 - RNA, 23 nt, Artificial sequence
  >hsa-miR-512-5p MIMAT0002822 Homo sapiens miR-512-5p
cacucagccuugagggcacuuuc

SEQ ID NO: 1561 - RNA, 23 nt, Artificial sequence
  >hsa-miR-513a-3p MIMAT0004777 Homo sapiens miR-513a-3p
uaaauuucaccuuucugagaagg

SEQ ID NO: 1562 - RNA, 18 nt, Artificial sequence
  >hsa-miR-513a-5p MIMAT0002877 Homo sapiens miR-513a-5p
uucacagggaggugucau

SEQ ID NO: 1563 - RNA, 22 nt, Artificial sequence
  >hsa-miR-513b-3p MIMAT0026749 Homo sapiens miR-513b-3p
aaaugucaccuuuuugagagga

SEQ ID NO: 1564 - RNA, 22 nt, Artificial sequence
  >hsa-miR-513b-5p MIMAT0005788 Homo sapiens miR-513b-5p
uucacaaggaggugucauuuau

SEQ ID NO: 1565 - RNA, 23 nt, Artificial sequence
  >hsa-miR-513c-3p MIMAT0022728 Homo sapiens miR-513c-3p
uaaauuucaccuuucugagaaga

SEQ ID NO: 1566 - RNA, 22 nt, Artificial sequence
  >hsa-miR-513c-5p MIMAT0005789 Homo sapiens miR-513c-5p
uucucaaggaggugucguuuau

SEQ ID NO: 1567 - RNA, 21 nt, Artificial sequence
  >hsa-miR-514a-3p MIMAT0002883 Homo sapiens miR-514a-3p
auugacacuucugugaguaga

SEQ ID NO: 1568 - RNA, 23 nt, Artificial sequence
  >hsa-miR-514a-5p MIMAT0022702 Homo sapiens miR-514a-5p
uacucuggagagugacaaucaug

SEQ ID NO: 1569 - RNA, 21 nt, Artificial sequence
  >hsa-miR-514b-3p MIMAT0015088 Homo sapiens miR-514b-3p
auugacaccucugugagugga

SEQ ID NO: 1570 - RNA, 22 nt, Artificial sequence
  >hsa-miR-514b-5p MIMAT0015087 Homo sapiens miR-514b-5p
uucucaagagggaggcaaucau

SEQ ID NO: 1571 - RNA, 22 nt, Artificial sequence
  >hsa-miR-515-3p MIMAT0002827 Homo sapiens miR-515-3p
gagugccuucuuuuggagcguu

SEQ ID NO: 1572 - RNA, 24 nt, Artificial sequence
  >hsa-miR-515-5p MIMAT0002826 Homo sapiens miR-515-5p
uucuccaaaagaaagcacuuucug

SEQ ID NO: 1573 - RNA, 18 nt, Artificial sequence
  >hsa-miR-516a-3p MIMAT0006778 Homo sapiens miR-516a-3p
ugcuuccuuucagagggu

SEQ ID NO: 1574 - RNA, 23 nt, Artificial sequence
  >hsa-miR-516a-5p MIMAT0004770 Homo sapiens miR-516a-5p
uucucgaggaaagaagcacuuuc

SEQ ID NO: 1575 - RNA, 18 nt, Artificial sequence
  >hsa-miR-516b-3p MIMAT0002860 Homo sapiens miR-516b-3p
ugcuuccuuucagagggu

SEQ ID NO: 1576 - RNA, 22 nt, Artificial sequence
  >hsa-miR-516b-5p MIMAT0002859 Homo sapiens miR-516b-5p
aucuggagguaagaagcacuuu

SEQ ID NO: 1577 - RNA, 22 nt, Artificial sequence
  >hsa-miR-517-5p MIMAT0002851 Homo sapiens miR-517-5p
ccucuagauggaagcacugucu

SEQ ID NO: 1578 - RNA, 22 nt, Artificial sequence
  >hsa-miR-517a-3p MIMAT0002852 Homo sapiens miR-517a-3p
aucgugcaucccuuuagagugu

SEQ ID NO: 1579 - RNA, 22 nt, Artificial sequence
  >hsa-miR-517b-3p MIMAT0002857 Homo sapiens miR-517b-3p
aucgugcaucccuuuagagugu

SEQ ID NO: 1580 - RNA, 22 nt, Artificial sequence
  >hsa-miR-517c-3p MIMAT0002866 Homo sapiens miR-517c-3p
aucgugcauccuuuuagagugu

SEQ ID NO: 1581 - RNA, 21 nt, Artificial sequence
  >hsa-miR-5186 MIMAT0021116 Homo sapiens miR-5186
agagauugguagaaaucaggu

SEQ ID NO: 1582 - RNA, 21 nt, Artificial sequence
  >hsa-miR-5187-3p MIMAT0021118 Homo sapiens miR-5187-3p
acugaauccucuuuuccucag

SEQ ID NO: 1583 - RNA, 22 nt, Artificial sequence
  >hsa-miR-5187-5p MIMAT0021117 Homo sapiens miR-5187-5p
ugggaugagggauugaagugga

SEQ ID NO: 1584 - RNA, 23 nt, Artificial sequence
  >hsa-miR-5188 MIMAT0021119 Homo sapiens miR-5188
aaucggacccauuuaaaccggag

SEQ ID NO: 1585 - RNA, 21 nt, Artificial sequence
  >hsa-miR-5189-3p MIMAT0027088 Homo sapiens miR-5189-3p
ugccaaccgucagagcccaga

SEQ ID NO: 1586 - RNA, 24 nt, Artificial sequence
  >hsa-miR-5189-5p MIMAT0021120 Homo sapiens miR-5189-5p
ucugggcacaggcggauggacagg

SEQ ID NO: 1587 - RNA, 22 nt, Artificial sequence
  >hsa-miR-518a-3p MIMAT0002863 Homo sapiens miR-518a-3p
gaaagcgcuucccuuugcugga

SEQ ID NO: 1588 - RNA, 20 nt, Artificial sequence
  >hsa-miR-518a-5p MIMAT0005457 Homo sapiens miR-518a-5p
cugcaaagggaagcccuuuc

SEQ ID NO: 1589 - RNA, 22 nt, Artificial sequence
  >hsa-miR-518b MIMAT0002844 Homo sapiens miR-518b
caaagcgcuccccuuuagaggu

SEQ ID NO: 1590 - RNA, 23 nt, Artificial sequence
  >hsa-miR-518c-3p MIMAT0002848 Homo sapiens miR-518c-3p
caaagcgcuucucuuuagagugu

SEQ ID NO: 1591 - RNA, 23 nt, Artificial sequence
  >hsa-miR-518c-5p MIMAT0002847 Homo sapiens miR-518c-5p
ucucuggagggaagcacuuucug

SEQ ID NO: 1592 - RNA, 21 nt, Artificial sequence
  >hsa-miR-518d-3p MIMAT0002864 Homo sapiens miR-518d-3p
caaagcgcuucccuuuggagc

SEQ ID NO: 1593 - RNA, 22 nt, Artificial sequence
  >hsa-miR-518d-5p MIMAT0005456 Homo sapiens miR-518d-5p
cucuagagggaagcacuuucug

SEQ ID NO: 1594 - RNA, 21 nt, Artificial sequence
  >hsa-miR-518e-3p MIMAT0002861 Homo sapiens miR-518e-3p
aaagcgcuucccuucagagug

SEQ ID NO: 1595 - RNA, 22 nt, Artificial sequence
  >hsa-miR-518e-5p MIMAT0005450 Homo sapiens miR-518e-5p
cucuagagggaagcgcuuucug

SEQ ID NO: 1596 - RNA, 21 nt, Artificial sequence
  >hsa-miR-518f-3p MIMAT0002842 Homo sapiens miR-518f-3p
gaaagcgcuucucuuuagagg

SEQ ID NO: 1597 - RNA, 22 nt, Artificial sequence
  >hsa-miR-518f-5p MIMAT0002841 Homo sapiens miR-518f-5p
cucuagagggaagcacuuucuc

SEQ ID NO: 1598 - RNA, 21 nt, Artificial sequence
  >hsa-miR-5190 MIMAT0021121 Homo sapiens miR-5190
ccagugacugagcuggagcca

SEQ ID NO: 1599 - RNA, 22 nt, Artificial sequence
  >hsa-miR-5191 MIMAT0021122 Homo sapiens miR-5191
aggauaggaagaaugaagugcu

SEQ ID NO: 1600 - RNA, 22 nt, Artificial sequence
  >hsa-miR-5192 MIMAT0021123 Homo sapiens miR-5192
aggagaguggauuccagguggu

SEQ ID NO: 1601 - RNA, 22 nt, Artificial sequence
  >hsa-miR-5193 MIMAT0021124 Homo sapiens miR-5193
uccuccucuaccucaucccagu

SEQ ID NO: 1602 - RNA, 22 nt, Artificial sequence
  >hsa-miR-5194 MIMAT0021125 Homo sapiens miR-5194
ugagggguuuggaaugggaugg

SEQ ID NO: 1603 - RNA, 21 nt, Artificial sequence
  >hsa-miR-5195-3p MIMAT0021127 Homo sapiens miR-5195-3p
auccaguucucugagggggcu

SEQ ID NO: 1604 - RNA, 22 nt, Artificial sequence
  >hsa-miR-5195-5p MIMAT0021126 Homo sapiens miR-5195-5p
aaccccuaaggcaacuggaugg

SEQ ID NO: 1605 - RNA, 21 nt, Artificial sequence
  >hsa-miR-5196-3p MIMAT0021129 Homo sapiens miR-5196-3p
ucauccucgucucccucccag

SEQ ID NO: 1606 - RNA, 22 nt, Artificial sequence
  >hsa-miR-5196-5p MIMAT0021128 Homo sapiens miR-5196-5p
agggaaggggacgaggguuggg

SEQ ID NO: 1607 - RNA, 23 nt, Artificial sequence
  >hsa-miR-5197-3p MIMAT0021131 Homo sapiens miR-5197-3p
aagaagagacugagucaucgaau

SEQ ID NO: 1608 - RNA, 23 nt, Artificial sequence
  >hsa-miR-5197-5p MIMAT0021130 Homo sapiens miR-5197-5p
caauggcacaaacucauucuuga

SEQ ID NO: 1609 - RNA, 22 nt, Artificial sequence
  >hsa-miR-519a-3p MIMAT0002869 Homo sapiens miR-519a-3p
aaagugcauccuuuuagagugu

SEQ ID NO: 1610 - RNA, 22 nt, Artificial sequence
  >hsa-miR-519a-5p MIMAT0005452 Homo sapiens miR-519a-5p
cucuagagggaagcgcuuucug

SEQ ID NO: 1611 - RNA, 22 nt, Artificial sequence
  >hsa-miR-519b-3p MIMAT0002837 Homo sapiens miR-519b-3p
aaagugcauccuuuuagagguu

SEQ ID NO: 1612 - RNA, 22 nt, Artificial sequence
  >hsa-miR-519b-5p MIMAT0005454 Homo sapiens miR-519b-5p
cucuagagggaagcgcuuucug

SEQ ID NO: 1613 - RNA, 22 nt, Artificial sequence
  >hsa-miR-519c-3p MIMAT0002832 Homo sapiens miR-519c-3p
aaagugcaucuuuuuagaggau

SEQ ID NO: 1614 - RNA, 22 nt, Artificial sequence
  >hsa-miR-519c-5p MIMAT0002831 Homo sapiens miR-519c-5p
cucuagagggaagcgcuuucug

SEQ ID NO: 1615 - RNA, 22 nt, Artificial sequence
  >hsa-miR-519d-3p MIMAT0002853 Homo sapiens miR-519d-3p
caaagugccucccuuuagagug

SEQ ID NO: 1616 - RNA, 25 nt, Artificial sequence
  >hsa-miR-519d-5p MIMAT0026610 Homo sapiens miR-519d-5p
ccuccaaagggaagcgcuuucuguu

SEQ ID NO: 1617 - RNA, 22 nt, Artificial sequence
  >hsa-miR-519e-3p MIMAT0002829 Homo sapiens miR-519e-3p
aagugccuccuuuuagaguguu

SEQ ID NO: 1618 - RNA, 22 nt, Artificial sequence
  >hsa-miR-519e-5p MIMAT0002828 Homo sapiens miR-519e-5p
uucuccaaaagggagcacuuuc

SEQ ID NO: 1619 - RNA, 22 nt, Artificial sequence
  >hsa-miR-520a-3p MIMAT0002834 Homo sapiens miR-520a-3p
aaagugcuucccuuuggacugu

SEQ ID NO: 1620 - RNA, 21 nt, Artificial sequence
  >hsa-miR-520a-5p MIMAT0002833 Homo sapiens miR-520a-5p
cuccagagggaaguacuuucu

SEQ ID NO: 1621 - RNA, 21 nt, Artificial sequence
  >hsa-miR-520b MIMAT0002843 Homo sapiens miR-520b
aaagugcuuccuuuuagaggg

SEQ ID NO: 1622 - RNA, 22 nt, Artificial sequence
  >hsa-miR-520c-3p MIMAT0002846 Homo sapiens miR-520c-3p
aaagugcuuccuuuuagagggu

SEQ ID NO: 1623 - RNA, 22 nt, Artificial sequence
  >hsa-miR-520c-5p MIMAT0005455 Homo sapiens miR-520c-5p
cucuagagggaagcacuuucug

SEQ ID NO: 1624 - RNA, 22 nt, Artificial sequence
  >hsa-miR-520d-3p MIMAT0002856 Homo sapiens miR-520d-3p
aaagugcuucucuuuggugggu

SEQ ID NO: 1625 - RNA, 20 nt, Artificial sequence
  >hsa-miR-520d-5p MIMAT0002855 Homo sapiens miR-520d-5p
cuacaaagggaagcccuuuc

SEQ ID NO: 1626 - RNA, 21 nt, Artificial sequence
  >hsa-miR-520e MIMAT0002825 Homo sapiens miR-520e
aaagugcuuccuuuuugaggg

SEQ ID NO: 1627 - RNA, 22 nt, Artificial sequence
  >hsa-miR-520f-3p MIMAT0002830 Homo sapiens miR-520f-3p
aagugcuuccuuuuagaggguu

SEQ ID NO: 1628 - RNA, 22 nt, Artificial sequence
  >hsa-miR-520f-5p MIMAT0026609 Homo sapiens miR-520f-5p
ccucuaaagggaagcgcuuucu

SEQ ID NO: 1629 - RNA, 24 nt, Artificial sequence
  >hsa-miR-520g-3p MIMAT0002858 Homo sapiens miR-520g-3p
acaaagugcuucccuuuagagugu

SEQ ID NO: 1630 - RNA, 23 nt, Artificial sequence
  >hsa-miR-520g-5p MIMAT0026611 Homo sapiens miR-520g-5p
ucuagaggaagcacuuucuguuu

SEQ ID NO: 1631 - RNA, 22 nt, Artificial sequence
  >hsa-miR-520h MIMAT0002867 Homo sapiens miR-520h
acaaagugcuucccuuuagagu

SEQ ID NO: 1632 - RNA, 22 nt, Artificial sequence
  >hsa-miR-521 MIMAT0002854 Homo sapiens miR-521
aacgcacuucccuuuagagugu

SEQ ID NO: 1633 - RNA, 22 nt, Artificial sequence
  >hsa-miR-522-3p MIMAT0002868 Homo sapiens miR-522-3p
aaaaugguucccuuuagagugu

SEQ ID NO: 1634 - RNA, 22 nt, Artificial sequence
  >hsa-miR-522-5p MIMAT0005451 Homo sapiens miR-522-5p
cucuagagggaagcgcuuucug

SEQ ID NO: 1635 - RNA, 23 nt, Artificial sequence
  >hsa-miR-523-3p MIMAT0002840 Homo sapiens miR-523-3p
gaacgcgcuucccuauagagggu

SEQ ID NO: 1636 - RNA, 22 nt, Artificial sequence
  >hsa-miR-523-5p MIMAT0005449 Homo sapiens miR-523-5p
cucuagagggaagcgcuuucug

SEQ ID NO: 1637 - RNA, 21 nt, Artificial sequence
  >hsa-miR-524-3p MIMAT0002850 Homo sapiens miR-524-3p
gaaggcgcuucccuuuggagu

SEQ ID NO: 1638 - RNA, 22 nt, Artificial sequence
  >hsa-miR-524-5p MIMAT0002849 Homo sapiens miR-524-5p
cuacaaagggaagcacuuucuc

SEQ ID NO: 1639 - RNA, 22 nt, Artificial sequence
  >hsa-miR-525-3p MIMAT0002839 Homo sapiens miR-525-3p
gaaggcgcuucccuuuagagcg

SEQ ID NO: 1640 - RNA, 21 nt, Artificial sequence
  >hsa-miR-525-5p MIMAT0002838 Homo sapiens miR-525-5p
cuccagagggaugcacuuucu

SEQ ID NO: 1641 - RNA, 22 nt, Artificial sequence
  >hsa-miR-526a MIMAT0002845 Homo sapiens miR-526a
cucuagagggaagcacuuucug

SEQ ID NO: 1642 - RNA, 22 nt, Artificial sequence
  >hsa-miR-526b-3p MIMAT0002836 Homo sapiens miR-526b-3p
gaaagugcuuccuuuuagaggc

SEQ ID NO: 1643 - RNA, 23 nt, Artificial sequence
  >hsa-miR-526b-5p MIMAT0002835 Homo sapiens miR-526b-5p
cucuugagggaagcacuuucugu

SEQ ID NO: 1644 - RNA, 20 nt, Artificial sequence
  >hsa-miR-527 MIMAT0002862 Homo sapiens miR-527
cugcaaagggaagcccuuuc

SEQ ID NO: 1645 - RNA, 22 nt, Artificial sequence
  >hsa-miR-532-3p MIMAT0004780 Homo sapiens miR-532-3p
ccucccacacccaaggcuugca

SEQ ID NO: 1646 - RNA, 22 nt, Artificial sequence
  >hsa-miR-532-5p MIMAT0002888 Homo sapiens miR-532-5p
caugccuugaguguaggaccgu

SEQ ID NO: 1647 - RNA, 22 nt, Artificial sequence
  >hsa-miR-539-3p MIMAT0022705 Homo sapiens miR-539-3p
aucauacaaggacaauuucuuu

SEQ ID NO: 1648 - RNA, 22 nt, Artificial sequence
  >hsa-miR-539-5p MIMAT0003163 Homo sapiens miR-539-5p
ggagaaauuauccuuggugugu

SEQ ID NO: 1649 - RNA, 22 nt, Artificial sequence
  >hsa-miR-541-3p MIMAT0004920 Homo sapiens miR-541-3p
uggugggcacagaaucuggacu

SEQ ID NO: 1650 - RNA, 25 nt, Artificial sequence
  >hsa-miR-541-5p MIMAT0004919 Homo sapiens miR-541-5p
aaaggauucugcugucggucccacu

SEQ ID NO: 1651 - RNA, 22 nt, Artificial sequence
  >hsa-miR-542-3p MIMAT0003389 Homo sapiens miR-542-3p
ugugacagauugauaacugaaa

SEQ ID NO: 1652 - RNA, 23 nt, Artificial sequence
  >hsa-miR-542-5p MIMAT0003340 Homo sapiens miR-542-5p
ucggggaucaucaugucacgaga

SEQ ID NO: 1653 - RNA, 22 nt, Artificial sequence
  >hsa-miR-543 MIMAT0004954 Homo sapiens miR-543
aaacauucgcggugcacuucuu

SEQ ID NO: 1654 - RNA, 22 nt, Artificial sequence
  >hsa-miR-544a MIMAT0003164 Homo sapiens miR-544a
auucugcauuuuuagcaaguuc

SEQ ID NO: 1655 - RNA, 22 nt, Artificial sequence
  >hsa-miR-544b MIMAT0015004 Homo sapiens miR-544b
accugagguugugcauuucuaa

SEQ ID NO: 1656 - RNA, 22 nt, Artificial sequence
  >hsa-miR-545-3p MIMAT0003165 Homo sapiens miR-545-3p
ucagcaaacauuuauugugugc

SEQ ID NO: 1657 - RNA, 22 nt, Artificial sequence
  >hsa-miR-545-5p MIMAT0004785 Homo sapiens miR-545-5p
ucaguaaauguuuauuagauga

SEQ ID NO: 1658 - RNA, 22 nt, Artificial sequence
  >hsa-miR-548a-3p MIMAT0003251 Homo sapiens miR-548a-3p
caaaacuggcaauuacuuuugc

SEQ ID NO: 1659 - RNA, 22 nt, Artificial sequence
  >hsa-miR-548a-5p MIMAT0004803 Homo sapiens miR-548a-5p
aaaaguaauugcgaguuuuacc

SEQ ID NO: 1660 - RNA, 25 nt, Artificial sequence
  >hsa-miR-548aa MIMAT0018447 Homo sapiens miR-548aa
aaaaaccacaauuacuuuugcacca

SEQ ID NO: 1661 - RNA, 22 nt, Artificial sequence
  >hsa-miR-548ab MIMAT0018928 Homo sapiens miR-548ab
aaaaguaauuguggauuuugcu

SEQ ID NO: 1662 - RNA, 22 nt, Artificial sequence
  >hsa-miR-548ac MIMAT0018938 Homo sapiens miR-548ac
caaaaaccggcaauuacuuuug

SEQ ID NO: 1663 - RNA, 22 nt, Artificial sequence
  >hsa-miR-548ad-3p MIMAT0018946 Homo sapiens miR-548ad-3p
gaaaacgacaaugacuuuugca

SEQ ID NO: 1664 - RNA, 20 nt, Artificial sequence
  >hsa-miR-548ad-5p MIMAT0032114 Homo sapiens miR-548ad-5p
aaaaguaauugugguuuuug

SEQ ID NO: 1665 - RNA, 21 nt, Artificial sequence
  >hsa-miR-548ae-3p MIMAT0018954 Homo sapiens miR-548ae-3p
caaaaacugcaauuacuuuca

SEQ ID NO: 1666 - RNA, 20 nt, Artificial sequence
  >hsa-miR-548ae-5p MIMAT0032115 Homo sapiens miR-548ae-5p
aaaaguaauugugguuuuug

SEQ ID NO: 1667 - RNA, 21 nt, Artificial sequence
  >hsa-miR-548ag MIMAT0018969 Homo sapiens miR-548ag
aaagguaauugugguuucugc

SEQ ID NO: 1668 - RNA, 22 nt, Artificial sequence
  >hsa-miR-548ah-3p MIMAT0020957 Homo sapiens miR-548ah-3p
caaaaacugcaguuacuuuugc

SEQ ID NO: 1669 - RNA, 20 nt, Artificial sequence
  >hsa-miR-548ah-5p MIMAT0018972 Homo sapiens miR-548ah-5p
aaaagugauugcaguguuug

SEQ ID NO: 1670 - RNA, 22 nt, Artificial sequence
  >hsa-miR-548ai MIMAT0018989 Homo sapiens miR-548ai
aaagguaauugcaguuuuuccc

SEQ ID NO: 1671 - RNA, 21 nt, Artificial sequence
  >hsa-miR-548aj-3p MIMAT0018990 Homo sapiens miR-548aj-3p
uaaaaacugcaauuacuuuua

SEQ ID NO: 1672 - RNA, 23 nt, Artificial sequence
  >hsa-miR-548aj-5p MIMAT0022739 Homo sapiens miR-548aj-5p
ugcaaaaguaauugcaguuuuug

SEQ ID NO: 1673 - RNA, 21 nt, Artificial sequence
  >hsa-miR-548ak MIMAT0019013 Homo sapiens miR-548ak
aaaaguaacugcgguuuuuga

SEQ ID NO: 1674 - RNA, 22 nt, Artificial sequence
  >hsa-miR-548al MIMAT0019024 Homo sapiens miR-548al
aacggcaaugacuuuuguacca

SEQ ID NO: 1675 - RNA, 22 nt, Artificial sequence
  >hsa-miR-548am-3p MIMAT0019076 Homo sapiens miR-548am-3p
caaaaacugcaguuacuuuugu

SEQ ID NO: 1676 - RNA, 22 nt, Artificial sequence
  >hsa-miR-548am-5p MIMAT0022740 Homo sapiens miR-548am-5p
aaaaguaauugcgguuuuugcc

SEQ ID NO: 1677 - RNA, 20 nt, Artificial sequence
  >hsa-miR-548an MIMAT0019079 Homo sapiens miR-548an
aaaaggcauugugguuuuug

SEQ ID NO: 1678 - RNA, 22 nt, Artificial sequence
  >hsa-miR-548ao-3p MIMAT0021030 Homo sapiens miR-548ao-3p
aaagaccgugacuacuuuugca

SEQ ID NO: 1679 - RNA, 22 nt, Artificial sequence
  >hsa-miR-548ao-5p MIMAT0021029 Homo sapiens miR-548ao-5p
agaaguaacuacgguuuuugca

SEQ ID NO: 1680 - RNA, 19 nt, Artificial sequence
  >hsa-miR-548ap-3p MIMAT0021038 Homo sapiens miR-548ap-3p
aaaaaccacaauuacuuuu

SEQ ID NO: 1681 - RNA, 19 nt, Artificial sequence
  >hsa-miR-548ap-5p MIMAT0021037 Homo sapiens miR-548ap-5p
aaaaguaauugcggucuuu

SEQ ID NO: 1682 - RNA, 22 nt, Artificial sequence
  >hsa-miR-548aq-3p MIMAT0022264 Homo sapiens miR-548aq-3p
caaaaacugcaauuacuuuugc

SEQ ID NO: 1683 - RNA, 22 nt, Artificial sequence
  >hsa-miR-548aq-5p MIMAT0022263 Homo sapiens miR-548aq-5p
gaaaguaauugcuguuuuugcc

SEQ ID NO: 1684 - RNA, 21 nt, Artificial sequence
  >hsa-miR-548ar-3p MIMAT0022266 Homo sapiens miR-548ar-3p
uaaaacugcaguuauuuuugc

SEQ ID NO: 1685 - RNA, 21 nt, Artificial sequence
  >hsa-miR-548ar-5p MIMAT0022265 Homo sapiens miR-548ar-5p
aaaaguaauugcaguuuuugc

SEQ ID NO: 1686 - RNA, 22 nt, Artificial sequence
  >hsa-miR-548as-3p MIMAT0022268 Homo sapiens miR-548as-3p
uaaaacccacaauuauguuugu

SEQ ID NO: 1687 - RNA, 22 nt, Artificial sequence
  >hsa-miR-548as-5p MIMAT0022267 Homo sapiens miR-548as-5p
aaaaguaauugcggguuuugcc

SEQ ID NO: 1688 - RNA, 21 nt, Artificial sequence
  >hsa-miR-548at-3p MIMAT0022278 Homo sapiens miR-548at-3p
caaaaccgcaguaacuuuugu

SEQ ID NO: 1689 - RNA, 22 nt, Artificial sequence
  >hsa-miR-548at-5p MIMAT0022277 Homo sapiens miR-548at-5p
aaaaguuauugcgguuuuggcu

SEQ ID NO: 1690 - RNA, 21 nt, Artificial sequence
  >hsa-miR-548au-3p MIMAT0022292 Homo sapiens miR-548au-3p
uggcaguuacuuuugcaccag

SEQ ID NO: 1691 - RNA, 21 nt, Artificial sequence
  >hsa-miR-548au-5p MIMAT0022291 Homo sapiens miR-548au-5p
aaaaguaauugcgguuuuugc

SEQ ID NO: 1692 - RNA, 20 nt, Artificial sequence
  >hsa-miR-548av-3p MIMAT0022304 Homo sapiens miR-548av-3p
aaaacugcaguuacuuuugc

SEQ ID NO: 1693 - RNA, 18 nt, Artificial sequence
  >hsa-miR-548av-5p MIMAT0022303 Homo sapiens miR-548av-5p
aaaaguacuugcggauuu

SEQ ID NO: 1694 - RNA, 20 nt, Artificial sequence
  >hsa-miR-548aw MIMAT0022471 Homo sapiens miR-548aw
gugcaaaagucaucacgguu

SEQ ID NO: 1695 - RNA, 22 nt, Artificial sequence
  >hsa-miR-548ax MIMAT0022474 Homo sapiens miR-548ax
agaaguaauugcgguuuugcca

SEQ ID NO: 1696 - RNA, 22 nt, Artificial sequence
  >hsa-miR-548ay-3p MIMAT0025453 Homo sapiens miR-548ay-3p
caaaaccgcgauuacucuugca

SEQ ID NO: 1697 - RNA, 21 nt, Artificial sequence
  >hsa-miR-548ay-5p MIMAT0025452 Homo sapiens miR-548ay-5p
aaaaguaauugugguuuuugc

SEQ ID NO: 1698 - RNA, 21 nt, Artificial sequence
  >hsa-miR-548az-3p MIMAT0025457 Homo sapiens miR-548az-3p
aaaaacugcaaucacuuuugc

SEQ ID NO: 1699 - RNA, 22 nt, Artificial sequence
  >hsa-miR-548az-5p MIMAT0025456 Homo sapiens miR-548az-5p
caaaagugauugugguuuuugc

SEQ ID NO: 1700 - RNA, 22 nt, Artificial sequence
  >hsa-miR-548b-3p MIMAT0003254 Homo sapiens miR-548b-3p
caagaaccucaguugcuuuugu

SEQ ID NO: 1701 - RNA, 22 nt, Artificial sequence
  >hsa-miR-548b-5p MIMAT0004798 Homo sapiens miR-548b-5p
aaaaguaauugugguuuuggcc

SEQ ID NO: 1702 - RNA, 22 nt, Artificial sequence
  >hsa-miR-548ba MIMAT0031175 Homo sapiens miR-548ba
aaagguaacugugauuuuugcu

SEQ ID NO: 1703 - RNA, 22 nt, Artificial sequence
  >hsa-miR-548bb-3p MIMAT0035704 Homo sapiens miR-548bb-3p
caaaaaccauaguuacuuuugc

SEQ ID NO: 1704 - RNA, 22 nt, Artificial sequence
  >hsa-miR-548bb-5p MIMAT0035703 Homo sapiens miR-548bb-5p
aaaaguaacuaugguuuuugcc

SEQ ID NO: 1705 - RNA, 22 nt, Artificial sequence
  >hsa-miR-548c-3p MIMAT0003285 Homo sapiens miR-548c-3p
caaaaaucucaauuacuuuugc

SEQ ID NO: 1706 - RNA, 22 nt, Artificial sequence
  >hsa-miR-548c-5p MIMAT0004806 Homo sapiens miR-548c-5p
aaaaguaauugcgguuuuugcc

SEQ ID NO: 1707 - RNA, 22 nt, Artificial sequence
  >hsa-miR-548d-3p MIMAT0003323 Homo sapiens miR-548d-3p
caaaaaccacaguuucuuuugc

SEQ ID NO: 1708 - RNA, 22 nt, Artificial sequence
  >hsa-miR-548d-5p MIMAT0004812 Homo sapiens miR-548d-5p
aaaaguaauugugguuuuugcc

SEQ ID NO: 1709 - RNA, 22 nt, Artificial sequence
  >hsa-miR-548e-3p MIMAT0005874 Homo sapiens miR-548e-3p
aaaaacugagacuacuuuugca

SEQ ID NO: 1710 - RNA, 22 nt, Artificial sequence
  >hsa-miR-548e-5p MIMAT0026736 Homo sapiens miR-548e-5p
caaaagcaaucgcgguuuuugc

SEQ ID NO: 1711 - RNA, 19 nt, Artificial sequence
  >hsa-miR-548f-3p MIMAT0005895 Homo sapiens miR-548f-3p
aaaaacuguaauuacuuuu

SEQ ID NO: 1712 - RNA, 22 nt, Artificial sequence
  >hsa-miR-548f-5p MIMAT0026739 Homo sapiens miR-548f-5p
ugcaaaaguaaucacaguuuuu

SEQ ID NO: 1713 - RNA, 22 nt, Artificial sequence
  >hsa-miR-548g-3p MIMAT0005912 Homo sapiens miR-548g-3p
aaaacuguaauuacuuuuguac

SEQ ID NO: 1714 - RNA, 23 nt, Artificial sequence
  >hsa-miR-548g-5p MIMAT0022722 Homo sapiens miR-548g-5p
ugcaaaaguaauugcaguuuuug

SEQ ID NO: 1715 - RNA, 23 nt, Artificial sequence
  >hsa-miR-548h-3p MIMAT0022723 Homo sapiens miR-548h-3p
caaaaaccgcaauuacuuuugca

SEQ ID NO: 1716 - RNA, 22 nt, Artificial sequence
  >hsa-miR-548h-5p MIMAT0005928 Homo sapiens miR-548h-5p
aaaaguaaucgcgguuuuuguc

SEQ ID NO: 1717 - RNA, 22 nt, Artificial sequence
  >hsa-miR-548i MIMAT0005935 Homo sapiens miR-548i
aaaaguaauugcggauuuugcc

SEQ ID NO: 1718 - RNA, 21 nt, Artificial sequence
  >hsa-miR-548j-3p MIMAT0026737 Homo sapiens miR-548j-3p
caaaaacugcauuacuuuugc

SEQ ID NO: 1719 - RNA, 22 nt, Artificial sequence
  >hsa-miR-548j-5p MIMAT0005875 Homo sapiens miR-548j-5p
aaaaguaauugcggucuuuggu

SEQ ID NO: 1720 - RNA, 22 nt, Artificial sequence
  >hsa-miR-548k MIMAT0005882 Homo sapiens miR-548k
aaaaguacuugcggauuuugcu

SEQ ID NO: 1721 - RNA, 22 nt, Artificial sequence
  >hsa-miR-548l MIMAT0005889 Homo sapiens miR-548l
aaaaguauuugcggguuuuguc

SEQ ID NO: 1722 - RNA, 21 nt, Artificial sequence
  >hsa-miR-548m MIMAT0005917 Homo sapiens miR-548m
caaagguauuugugguuuuug

SEQ ID NO: 1723 - RNA, 22 nt, Artificial sequence
  >hsa-miR-548n MIMAT0005916 Homo sapiens miR-548n
caaaaguaauuguggauuuugu

SEQ ID NO: 1724 - RNA, 22 nt, Artificial sequence
  >hsa-miR-548o-3p MIMAT0005919 Homo sapiens miR-548o-3p
ccaaaacugcaguuacuuuugc

SEQ ID NO: 1725 - RNA, 22 nt, Artificial sequence
  >hsa-miR-548o-5p MIMAT0022738 Homo sapiens miR-548o-5p
aaaaguaauugcgguuuuugcc

SEQ ID NO: 1726 - RNA, 22 nt, Artificial sequence
  >hsa-miR-548p MIMAT0005934 Homo sapiens miR-548p
uagcaaaaacugcaguuacuuu

SEQ ID NO: 1727 - RNA, 22 nt, Artificial sequence
  >hsa-miR-548q MIMAT0011163 Homo sapiens miR-548q
gcuggugcaaaaguaauggcgg

SEQ ID NO: 1728 - RNA, 23 nt, Artificial sequence
  >hsa-miR-548s MIMAT0014987 Homo sapiens miR-548s
auggccaaaacugcaguuauuuu

SEQ ID NO: 1729 - RNA, 25 nt, Artificial sequence
  >hsa-miR-548t-3p MIMAT0022730 Homo sapiens miR-548t-3p
aaaaaccacaauuacuuuugcacca

SEQ ID NO: 1730 - RNA, 21 nt, Artificial sequence
  >hsa-miR-548t-5p MIMAT0015009 Homo sapiens miR-548t-5p
caaaagugaucgugguuuuug

SEQ ID NO: 1731 - RNA, 23 nt, Artificial sequence
  >hsa-miR-548u MIMAT0015013 Homo sapiens miR-548u
caaagacugcaauuacuuuugcg

SEQ ID NO: 1732 - RNA, 22 nt, Artificial sequence
  >hsa-miR-548v MIMAT0015020 Homo sapiens miR-548v
agcuacaguuacuuuugcacca

SEQ ID NO: 1733 - RNA, 23 nt, Artificial sequence
  >hsa-miR-548w MIMAT0015060 Homo sapiens miR-548w
aaaaguaacugcgguuuuugccu

SEQ ID NO: 1734 - RNA, 20 nt, Artificial sequence
  >hsa-miR-548x-3p MIMAT0015081 Homo sapiens miR-548x-3p
uaaaaacugcaauuacuuuc

SEQ ID NO: 1735 - RNA, 23 nt, Artificial sequence
  >hsa-miR-548x-5p MIMAT0022733 Homo sapiens miR-548x-5p
ugcaaaaguaauugcaguuuuug

SEQ ID NO: 1736 - RNA, 22 nt, Artificial sequence
  >hsa-miR-548y MIMAT0018354 Homo sapiens miR-548y
aaaaguaaucacuguuuuugcc

SEQ ID NO: 1737 - RNA, 23 nt, Artificial sequence
  >hsa-miR-548z MIMAT0018446 Homo sapiens miR-548z
caaaaaccgcaauuacuuuugca

SEQ ID NO: 1738 - RNA, 21 nt, Artificial sequence
  >hsa-miR-549a MIMAT0003333 Homo sapiens miR-549a
ugacaacuauggaugagcucu

SEQ ID NO: 1739 - RNA, 20 nt, Artificial sequence
  >hsa-miR-550a-3-5p MIMAT0020925 Homo sapiens miR-550a-3-5p
agugccugagggaguaagag

SEQ ID NO: 1740 - RNA, 22 nt, Artificial sequence
  >hsa-miR-550a-3p MIMAT0003257 Homo sapiens miR-550a-3p
ugucuuacucccucaggcacau

SEQ ID NO: 1741 - RNA, 23 nt, Artificial sequence
  >hsa-miR-550a-5p MIMAT0004800 Homo sapiens miR-550a-5p
agugccugagggaguaagagccc

SEQ ID NO: 1742 - RNA, 22 nt, Artificial sequence
  >hsa-miR-550b-2-5p MIMAT0022737 Homo sapiens miR-550b-2-5p
augugccugagggaguaagaca

SEQ ID NO: 1743 - RNA, 20 nt, Artificial sequence
  >hsa-miR-550b-3p MIMAT0018445 Homo sapiens miR-550b-3p
ucuuacucccucaggcacug

SEQ ID NO: 1744 - RNA, 21 nt, Artificial sequence
  >hsa-miR-551a MIMAT0003214 Homo sapiens miR-551a
gcgacccacucuugguuucca

SEQ ID NO: 1745 - RNA, 21 nt, Artificial sequence
  >hsa-miR-551b-3p MIMAT0003233 Homo sapiens miR-551b-3p
gcgacccauacuugguuucag

SEQ ID NO: 1746 - RNA, 22 nt, Artificial sequence
  >hsa-miR-551b-5p MIMAT0004794 Homo sapiens miR-551b-5p
gaaaucaagcgugggugagacc

SEQ ID NO: 1747 - RNA, 21 nt, Artificial sequence
  >hsa-miR-552-3p MIMAT0003215 Homo sapiens miR-552-3p
aacaggugacugguuagacaa

SEQ ID NO: 1748 - RNA, 21 nt, Artificial sequence
  >hsa-miR-552-5p MIMAT0026615 Homo sapiens miR-552-5p
guuuaaccuuuugccuguugg

SEQ ID NO: 1749 - RNA, 21 nt, Artificial sequence
  >hsa-miR-553 MIMAT0003216 Homo sapiens miR-553
aaaacggugagauuuuguuuu

SEQ ID NO: 1750 - RNA, 21 nt, Artificial sequence
  >hsa-miR-554 MIMAT0003217 Homo sapiens miR-554
gcuaguccugacucagccagu

SEQ ID NO: 1751 - RNA, 21 nt, Artificial sequence
  >hsa-miR-555 MIMAT0003219 Homo sapiens miR-555
aggguaagcugaaccucugau

SEQ ID NO: 1752 - RNA, 22 nt, Artificial sequence
  >hsa-miR-556-3p MIMAT0004793 Homo sapiens miR-556-3p
auauuaccauuagcucaucuuu

SEQ ID NO: 1753 - RNA, 22 nt, Artificial sequence
  >hsa-miR-556-5p MIMAT0003220 Homo sapiens miR-556-5p
gaugagcucauuguaauaugag

SEQ ID NO: 1754 - RNA, 23 nt, Artificial sequence
  >hsa-miR-557 MIMAT0003221 Homo sapiens miR-557
guuugcacgggugggccuugucu

SEQ ID NO: 1755 - RNA, 19 nt, Artificial sequence
  >hsa-miR-5571-3p MIMAT0022258 Homo sapiens miR-5571-3p
guccuaggaggcuccucug

SEQ ID NO: 1756 - RNA, 21 nt, Artificial sequence
  >hsa-miR-5571-5p MIMAT0022257 Homo sapiens miR-5571-5p
caauucucaaaggagccuccc

SEQ ID NO: 1757 - RNA, 21 nt, Artificial sequence
  >hsa-miR-5572 MIMAT0022260 Homo sapiens miR-5572
guuggggugcaggggucugcu

SEQ ID NO: 1758 - RNA, 22 nt, Artificial sequence
  >hsa-miR-5579-3p MIMAT0022270 Homo sapiens miR-5579-3p
uuagcuuaaggaguaccagauc

SEQ ID NO: 1759 - RNA, 21 nt, Artificial sequence
  >hsa-miR-5579-5p MIMAT0022269 Homo sapiens miR-5579-5p
uaugguacuccuuaagcuaac

SEQ ID NO: 1760 - RNA, 19 nt, Artificial sequence
  >hsa-miR-558 MIMAT0003222 Homo sapiens miR-558
ugagcugcuguaccaaaau

SEQ ID NO: 1761 - RNA, 22 nt, Artificial sequence
  >hsa-miR-5580-3p MIMAT0022274 Homo sapiens miR-5580-3p
cacauaugaagugagccagcac

SEQ ID NO: 1762 - RNA, 22 nt, Artificial sequence
  >hsa-miR-5580-5p MIMAT0022273 Homo sapiens miR-5580-5p
ugcuggcucauuucauaugugu

SEQ ID NO: 1763 - RNA, 22 nt, Artificial sequence
  >hsa-miR-5581-3p MIMAT0022276 Homo sapiens miR-5581-3p
uuccaugccuccuagaaguucc

SEQ ID NO: 1764 - RNA, 22 nt, Artificial sequence
  >hsa-miR-5581-5p MIMAT0022275 Homo sapiens miR-5581-5p
agccuuccaggagaaauggaga

SEQ ID NO: 1765 - RNA, 22 nt, Artificial sequence
  >hsa-miR-5582-3p MIMAT0022280 Homo sapiens miR-5582-3p
uaaaacuuuaagugugccuagg

SEQ ID NO: 1766 - RNA, 22 nt, Artificial sequence
  >hsa-miR-5582-5p MIMAT0022279 Homo sapiens miR-5582-5p
uaggcacacuuaaaguuauagc

SEQ ID NO: 1767 - RNA, 22 nt, Artificial sequence
  >hsa-miR-5583-3p MIMAT0022282 Homo sapiens miR-5583-3p
gaauauggguauauuaguuugg

SEQ ID NO: 1768 - RNA, 22 nt, Artificial sequence
  >hsa-miR-5583-5p MIMAT0022281 Homo sapiens miR-5583-5p
aaacuaauauacccauauucug

SEQ ID NO: 1769 - RNA, 22 nt, Artificial sequence
  >hsa-miR-5584-3p MIMAT0022284 Homo sapiens miR-5584-3p
uaguucuucccuuugcccaauu

SEQ ID NO: 1770 - RNA, 22 nt, Artificial sequence
  >hsa-miR-5584-5p MIMAT0022283 Homo sapiens miR-5584-5p
cagggaaaugggaagaacuaga

SEQ ID NO: 1771 - RNA, 22 nt, Artificial sequence
  >hsa-miR-5585-3p MIMAT0022286 Homo sapiens miR-5585-3p
cugaauagcugggacuacaggu

SEQ ID NO: 1772 - RNA, 22 nt, Artificial sequence
  >hsa-miR-5585-5p MIMAT0022285 Homo sapiens miR-5585-5p
ugaaguaccagcuacucgagag

SEQ ID NO: 1773 - RNA, 22 nt, Artificial sequence
  >hsa-miR-5586-3p MIMAT0022288 Homo sapiens miR-5586-3p
cagagugacaagcugguuaaag

SEQ ID NO: 1774 - RNA, 22 nt, Artificial sequence
  >hsa-miR-5586-5p MIMAT0022287 Homo sapiens miR-5586-5p
uauccagcuuguuacuauaugc

SEQ ID NO: 1775 - RNA, 21 nt, Artificial sequence
  >hsa-miR-5587-3p MIMAT0022290 Homo sapiens miR-5587-3p
gccccgggcagugugaucauc

SEQ ID NO: 1776 - RNA, 18 nt, Artificial sequence
  >hsa-miR-5587-5p MIMAT0022289 Homo sapiens miR-5587-5p
auggucaccuccgggacu

SEQ ID NO: 1777 - RNA, 19 nt, Artificial sequence
  >hsa-miR-5588-3p MIMAT0022296 Homo sapiens miR-5588-3p
aagucccacuaaugccagc

SEQ ID NO: 1778 - RNA, 21 nt, Artificial sequence
  >hsa-miR-5588-5p MIMAT0022295 Homo sapiens miR-5588-5p
acuggcauuagugggacuuuu

SEQ ID NO: 1779 - RNA, 23 nt, Artificial sequence
  >hsa-miR-5589-3p MIMAT0022298 Homo sapiens miR-5589-3p
ugcacauggcaaccuagcuccca

SEQ ID NO: 1780 - RNA, 21 nt, Artificial sequence
  >hsa-miR-5589-5p MIMAT0022297 Homo sapiens miR-5589-5p
ggcugggugcucuugugcagu

SEQ ID NO: 1781 - RNA, 21 nt, Artificial sequence
  >hsa-miR-559 MIMAT0003223 Homo sapiens miR-559
uaaaguaaauaugcaccaaaa

SEQ ID NO: 1782 - RNA, 21 nt, Artificial sequence
  >hsa-miR-5590-3p MIMAT0022300 Homo sapiens miR-5590-3p
aauaaaguucauguauggcaa

SEQ ID NO: 1783 - RNA, 21 nt, Artificial sequence
  >hsa-miR-5590-5p MIMAT0022299 Homo sapiens miR-5590-5p
uugccauacauagacuuuauu

SEQ ID NO: 1784 - RNA, 21 nt, Artificial sequence
  >hsa-miR-5591-3p MIMAT0022302 Homo sapiens miR-5591-3p
auacccauagcuuagcuccca

SEQ ID NO: 1785 - RNA, 21 nt, Artificial sequence
  >hsa-miR-5591-5p MIMAT0022301 Homo sapiens miR-5591-5p
ugggagcuaagcuauggguau

SEQ ID NO: 1786 - RNA, 22 nt, Artificial sequence
  >hsa-miR-561-3p MIMAT0003225 Homo sapiens miR-561-3p
caaaguuuaagauccuugaagu

SEQ ID NO: 1787 - RNA, 22 nt, Artificial sequence
  >hsa-miR-561-5p MIMAT0022706 Homo sapiens miR-561-5p
aucaaggaucuuaaacuuugcc

SEQ ID NO: 1788 - RNA, 20 nt, Artificial sequence
  >hsa-miR-562 MIMAT0003226 Homo sapiens miR-562
aaaguagcuguaccauuugc

SEQ ID NO: 1789 - RNA, 19 nt, Artificial sequence
  >hsa-miR-563 MIMAT0003227 Homo sapiens miR-563
agguugacauacguuuccc

SEQ ID NO: 1790 - RNA, 19 nt, Artificial sequence
  >hsa-miR-564 MIMAT0003228 Homo sapiens miR-564
aggcacggugucagcaggc

SEQ ID NO: 1791 - RNA, 19 nt, Artificial sequence
  >hsa-miR-566 MIMAT0003230 Homo sapiens miR-566
gggcgccugugaucccaac

SEQ ID NO: 1792 - RNA, 23 nt, Artificial sequence
  >hsa-miR-567 MIMAT0003231 Homo sapiens miR-567
aguauguucuuccaggacagaac

SEQ ID NO: 1793 - RNA, 20 nt, Artificial sequence
  >hsa-miR-568 MIMAT0003232 Homo sapiens miR-568
auguauaaauguauacacac

SEQ ID NO: 1794 - RNA, 22 nt, Artificial sequence
  >hsa-miR-5680 MIMAT0022468 Homo sapiens miR-5680
gagaaaugcuggacuaaucugc

SEQ ID NO: 1795 - RNA, 22 nt, Artificial sequence
  >hsa-miR-5681a MIMAT0022469 Homo sapiens miR-5681a
agaaaggguggcaauaccucuu

SEQ ID NO: 1796 - RNA, 22 nt, Artificial sequence
  >hsa-miR-5681b MIMAT0022480 Homo sapiens miR-5681b
agguauugccacccuuucuagu

SEQ ID NO: 1797 - RNA, 22 nt, Artificial sequence
  >hsa-miR-5682 MIMAT0022470 Homo sapiens miR-5682
guagcaccuugcaggauaaggu

SEQ ID NO: 1798 - RNA, 24 nt, Artificial sequence
  >hsa-miR-5683 MIMAT0022472 Homo sapiens miR-5683
uacagaugcagauucucugacuuc

SEQ ID NO: 1799 - RNA, 20 nt, Artificial sequence
  >hsa-miR-5684 MIMAT0022473 Homo sapiens miR-5684
aacucuagccugagcaacag

SEQ ID NO: 1800 - RNA, 22 nt, Artificial sequence
  >hsa-miR-5685 MIMAT0022475 Homo sapiens miR-5685
acagcccagcaguuaucacggg

SEQ ID NO: 1801 - RNA, 22 nt, Artificial sequence
  >hsa-miR-5687 MIMAT0022478 Homo sapiens miR-5687
uuagaacguuuuagggucaaau

SEQ ID NO: 1802 - RNA, 22 nt, Artificial sequence
  >hsa-miR-5688 MIMAT0022479 Homo sapiens miR-5688
uaacaaacaccuguaaaacagc

SEQ ID NO: 1803 - RNA, 22 nt, Artificial sequence
  >hsa-miR-5689 MIMAT0022481 Homo sapiens miR-5689
agcauacaccuguaguccuaga

SEQ ID NO: 1804 - RNA, 21 nt, Artificial sequence
  >hsa-miR-569 MIMAT0003234 Homo sapiens miR-569
aguuaaugaauccuggaaagu

SEQ ID NO: 1805 - RNA, 21 nt, Artificial sequence
  >hsa-miR-5690 MIMAT0022482 Homo sapiens miR-5690
ucagcuacuaccucuauuagg

SEQ ID NO: 1806 - RNA, 22 nt, Artificial sequence
  >hsa-miR-5691 MIMAT0022483 Homo sapiens miR-5691
uugcucugagcuccgagaaagc

SEQ ID NO: 1807 - RNA, 22 nt, Artificial sequence
  >hsa-miR-5692a MIMAT0022484 Homo sapiens miR-5692a
caaauaauaccacagugggugu

SEQ ID NO: 1808 - RNA, 20 nt, Artificial sequence
  >hsa-miR-5692b MIMAT0022497 Homo sapiens miR-5692b
aauaauaucacaguaggugu

SEQ ID NO: 1809 - RNA, 22 nt, Artificial sequence
  >hsa-miR-5692c MIMAT0022476 Homo sapiens miR-5692c
aauaauaucacaguagguguac

SEQ ID NO: 1810 - RNA, 22 nt, Artificial sequence
  >hsa-miR-5693 MIMAT0022486 Homo sapiens miR-5693
gcaguggcucugaaaugaacuc

SEQ ID NO: 1811 - RNA, 21 nt, Artificial sequence
  >hsa-miR-5694 MIMAT0022487 Homo sapiens miR-5694
cagaucaugggacugucucag

SEQ ID NO: 1812 - RNA, 22 nt, Artificial sequence
  >hsa-miR-5695 MIMAT0022488 Homo sapiens miR-5695
acuccaagaagaaucuagacag

SEQ ID NO: 1813 - RNA, 22 nt, Artificial sequence
  >hsa-miR-5696 MIMAT0022489 Homo sapiens miR-5696
cucauuuaaguagucugaugcc

SEQ ID NO: 1814 - RNA, 22 nt, Artificial sequence
  >hsa-miR-5697 MIMAT0022490 Homo sapiens miR-5697
ucaaguaguuucaugauaaagg

SEQ ID NO: 1815 - RNA, 22 nt, Artificial sequence
  >hsa-miR-5698 MIMAT0022491 Homo sapiens miR-5698
ugggggagugcagugauugugg

SEQ ID NO: 1816 - RNA, 22 nt, Artificial sequence
  >hsa-miR-5699-3p MIMAT0022492 Homo sapiens miR-5699-3p
uccugucuuuccuuguuggagc

SEQ ID NO: 1817 - RNA, 22 nt, Artificial sequence
  >hsa-miR-5699-5p MIMAT0027103 Homo sapiens miR-5699-5p
ugccccaacaaggaaggacaag

SEQ ID NO: 1818 - RNA, 22 nt, Artificial sequence
  >hsa-miR-570-3p MIMAT0003235 Homo sapiens miR-570-3p
cgaaaacagcaauuaccuuugc

SEQ ID NO: 1819 - RNA, 22 nt, Artificial sequence
  >hsa-miR-570-5p MIMAT0022707 Homo sapiens miR-570-5p
aaagguaauugcaguuuuuccc

SEQ ID NO: 1820 - RNA, 22 nt, Artificial sequence
  >hsa-miR-5700 MIMAT0022493 Homo sapiens miR-5700
uaaugcauuaaauuauugaagg

SEQ ID NO: 1821 - RNA, 19 nt, Artificial sequence
  >hsa-miR-5701 MIMAT0022494 Homo sapiens miR-5701
uuauugucacguucugauu

SEQ ID NO: 1822 - RNA, 22 nt, Artificial sequence
  >hsa-miR-5702 MIMAT0022495 Homo sapiens miR-5702
ugagucagcaacauaucccaug

SEQ ID NO: 1823 - RNA, 18 nt, Artificial sequence
  >hsa-miR-5703 MIMAT0022496 Homo sapiens miR-5703
aggagaagucgggaaggu

SEQ ID NO: 1824 - RNA, 22 nt, Artificial sequence
  >hsa-miR-5704 MIMAT0022498 Homo sapiens miR-5704
uuaggccaucaucccauuaugc

SEQ ID NO: 1825 - RNA, 23 nt, Artificial sequence
  >hsa-miR-5705 MIMAT0022499 Homo sapiens miR-5705
uguuucggggcucauggccugug

SEQ ID NO: 1826 - RNA, 22 nt, Artificial sequence
  >hsa-miR-5706 MIMAT0022500 Homo sapiens miR-5706
uucuggauaacaugcugaagcu

SEQ ID NO: 1827 - RNA, 22 nt, Artificial sequence
  >hsa-miR-5707 MIMAT0022501 Homo sapiens miR-5707
acguuugaaugcuguacaaggc

SEQ ID NO: 1828 - RNA, 20 nt, Artificial sequence
  >hsa-miR-5708 MIMAT0022502 Homo sapiens miR-5708
augagcgacugugccugacc

SEQ ID NO: 1829 - RNA, 21 nt, Artificial sequence
  >hsa-miR-571 MIMAT0003236 Homo sapiens miR-571
ugaguuggccaucugagugag

SEQ ID NO: 1830 - RNA, 20 nt, Artificial sequence
  >hsa-miR-572 MIMAT0003237 Homo sapiens miR-572
guccgcucggcgguggccca

SEQ ID NO: 1831 - RNA, 24 nt, Artificial sequence
  >hsa-miR-573 MIMAT0003238 Homo sapiens miR-573
cugaagugauguguaacugaucag

SEQ ID NO: 1832 - RNA, 20 nt, Artificial sequence
  >hsa-miR-5739 MIMAT0023116 Homo sapiens miR-5739
gcggagagagaauggggagc

SEQ ID NO: 1833 - RNA, 22 nt, Artificial sequence
  >hsa-miR-574-3p MIMAT0003239 Homo sapiens miR-574-3p
cacgcucaugcacacacccaca

SEQ ID NO: 1834 - RNA, 23 nt, Artificial sequence
  >hsa-miR-574-5p MIMAT0004795 Homo sapiens miR-574-5p
ugagugugugugugugagugugu

SEQ ID NO: 1835 - RNA, 19 nt, Artificial sequence
  >hsa-miR-575 MIMAT0003240 Homo sapiens miR-575
gagccaguuggacaggagc

SEQ ID NO: 1836 - RNA, 22 nt, Artificial sequence
  >hsa-miR-576-3p MIMAT0004796 Homo sapiens miR-576-3p
aagauguggaaaaauuggaauc

SEQ ID NO: 1837 - RNA, 22 nt, Artificial sequence
  >hsa-miR-576-5p MIMAT0003241 Homo sapiens miR-576-5p
auucuaauuucuccacgucuuu

SEQ ID NO: 1838 - RNA, 21 nt, Artificial sequence
  >hsa-miR-577 MIMAT0003242 Homo sapiens miR-577
uagauaaaauauugguaccug

SEQ ID NO: 1839 - RNA, 21 nt, Artificial sequence
  >hsa-miR-578 MIMAT0003243 Homo sapiens miR-578
cuucuugugcucuaggauugu

SEQ ID NO: 1840 - RNA, 20 nt, Artificial sequence
  >hsa-miR-5787 MIMAT0023252 Homo sapiens miR-5787
gggcuggggcgcggggaggu

SEQ ID NO: 1841 - RNA, 23 nt, Artificial sequence
  >hsa-miR-579-3p MIMAT0003244 Homo sapiens miR-579-3p
uucauuugguauaaaccgcgauu

SEQ ID NO: 1842 - RNA, 22 nt, Artificial sequence
  >hsa-miR-579-5p MIMAT0026616 Homo sapiens miR-579-5p
ucgcgguuugugccagaugacg

SEQ ID NO: 1843 - RNA, 22 nt, Artificial sequence
  >hsa-miR-580-3p MIMAT0003245 Homo sapiens miR-580-3p
uugagaaugaugaaucauuagg

SEQ ID NO: 1844 - RNA, 22 nt, Artificial sequence
  >hsa-miR-580-5p MIMAT0026617 Homo sapiens miR-580-5p
uaaugauucaucagacucagau

SEQ ID NO: 1845 - RNA, 21 nt, Artificial sequence
  >hsa-miR-581 MIMAT0003246 Homo sapiens miR-581
ucuuguguucucuagaucagu

SEQ ID NO: 1846 - RNA, 22 nt, Artificial sequence
  >hsa-miR-582-3p MIMAT0004797 Homo sapiens miR-582-3p
uaacugguugaacaacugaacc

SEQ ID NO: 1847 - RNA, 23 nt, Artificial sequence
  >hsa-miR-582-5p MIMAT0003247 Homo sapiens miR-582-5p
uuacaguuguucaaccaguuacu

SEQ ID NO: 1848 - RNA, 21 nt, Artificial sequence
  >hsa-miR-583 MIMAT0003248 Homo sapiens miR-583
caaagaggaaggucccauuac

SEQ ID NO: 1849 - RNA, 22 nt, Artificial sequence
  >hsa-miR-584-3p MIMAT0022708 Homo sapiens miR-584-3p
ucaguuccaggccaaccaggcu

SEQ ID NO: 1850 - RNA, 22 nt, Artificial sequence
  >hsa-miR-584-5p MIMAT0003249 Homo sapiens miR-584-5p
uuaugguuugccugggacugag

SEQ ID NO: 1851 - RNA, 19 nt, Artificial sequence
  >hsa-miR-585-3p MIMAT0003250 Homo sapiens miR-585-3p
ugggcguaucuguaugcua

SEQ ID NO: 1852 - RNA, 22 nt, Artificial sequence
  >hsa-miR-585-5p MIMAT0026618 Homo sapiens miR-585-5p
cuagcacacagauacgcccaga

SEQ ID NO: 1853 - RNA, 22 nt, Artificial sequence
  >hsa-miR-586 MIMAT0003252 Homo sapiens miR-586
uaugcauuguauuuuuaggucc

SEQ ID NO: 1854 - RNA, 21 nt, Artificial sequence
  >hsa-miR-587 MIMAT0003253 Homo sapiens miR-587
uuuccauaggugaugagucac

SEQ ID NO: 1855 - RNA, 21 nt, Artificial sequence
  >hsa-miR-588 MIMAT0003255 Homo sapiens miR-588
uuggccacaauggguuagaac

SEQ ID NO: 1856 - RNA, 24 nt, Artificial sequence
  >hsa-miR-589-3p MIMAT0003256 Homo sapiens miR-589-3p
ucagaacaaaugccgguucccaga

SEQ ID NO: 1857 - RNA, 22 nt, Artificial sequence
  >hsa-miR-589-5p MIMAT0004799 Homo sapiens miR-589-5p
ugagaaccacgucugcucugag

SEQ ID NO: 1858 - RNA, 21 nt, Artificial sequence
  >hsa-miR-590-3p MIMAT0004801 Homo sapiens miR-590-3p
uaauuuuauguauaagcuagu

SEQ ID NO: 1859 - RNA, 22 nt, Artificial sequence
  >hsa-miR-590-5p MIMAT0003258 Homo sapiens miR-590-5p
gagcuuauucauaaaagugcag

SEQ ID NO: 1860 - RNA, 20 nt, Artificial sequence
  >hsa-miR-591 MIMAT0003259 Homo sapiens miR-591
agaccauggguucucauugu

SEQ ID NO: 1861 - RNA, 22 nt, Artificial sequence
  >hsa-miR-592 MIMAT0003260 Homo sapiens miR-592
uugugucaauaugcgaugaugu

SEQ ID NO: 1862 - RNA, 19 nt, Artificial sequence
  >hsa-miR-593-3p MIMAT0004802 Homo sapiens miR-593-3p
ugucucugcugggguuucu

SEQ ID NO: 1863 - RNA, 25 nt, Artificial sequence
  >hsa-miR-593-5p MIMAT0003261 Homo sapiens miR-593-5p
aggcaccagccaggcauugcucagc

SEQ ID NO: 1864 - RNA, 21 nt, Artificial sequence
  >hsa-miR-595 MIMAT0003263 Homo sapiens miR-595
gaagugugccguggugugucu

SEQ ID NO: 1865 - RNA, 21 nt, Artificial sequence
  >hsa-miR-596 MIMAT0003264 Homo sapiens miR-596
aagccugcccggcuccucggg

SEQ ID NO: 1866 - RNA, 23 nt, Artificial sequence
  >hsa-miR-597-3p MIMAT0026619 Homo sapiens miR-597-3p
ugguucucuuguggcucaagcgu

SEQ ID NO: 1867 - RNA, 22 nt, Artificial sequence
  >hsa-miR-597-5p MIMAT0003265 Homo sapiens miR-597-5p
ugugucacucgaugaccacugu

SEQ ID NO: 1868 - RNA, 22 nt, Artificial sequence
  >hsa-miR-598-3p MIMAT0003266 Homo sapiens miR-598-3p
uacgucaucguugucaucguca

SEQ ID NO: 1869 - RNA, 23 nt, Artificial sequence
  >hsa-miR-598-5p MIMAT0026620 Homo sapiens miR-598-5p
gcggugaucccgauggugugagc

SEQ ID NO: 1870 - RNA, 20 nt, Artificial sequence
  >hsa-miR-599 MIMAT0003267 Homo sapiens miR-599
guugugucaguuuaucaaac

SEQ ID NO: 1871 - RNA, 23 nt, Artificial sequence
  >hsa-miR-600 MIMAT0003268 Homo sapiens miR-600
acuuacagacaagagccuugcuc

SEQ ID NO: 1872 - RNA, 22 nt, Artificial sequence
  >hsa-miR-601 MIMAT0003269 Homo sapiens miR-601
uggucuaggauuguuggaggag

SEQ ID NO: 1873 - RNA, 23 nt, Artificial sequence
  >hsa-miR-602 MIMAT0003270 Homo sapiens miR-602
gacacgggcgacagcugcggccc

SEQ ID NO: 1874 - RNA, 22 nt, Artificial sequence
  >hsa-miR-603 MIMAT0003271 Homo sapiens miR-603
cacacacugcaauuacuuuugc

SEQ ID NO: 1875 - RNA, 19 nt, Artificial sequence
  >hsa-miR-604 MIMAT0003272 Homo sapiens miR-604
aggcugcggaauucaggac

SEQ ID NO: 1876 - RNA, 22 nt, Artificial sequence
  >hsa-miR-605-3p MIMAT0026621 Homo sapiens miR-605-3p
agaaggcacuaugagauuuaga

SEQ ID NO: 1877 - RNA, 23 nt, Artificial sequence
  >hsa-miR-605-5p MIMAT0003273 Homo sapiens miR-605-5p
uaaaucccauggugccuucuccu

SEQ ID NO: 1878 - RNA, 21 nt, Artificial sequence
  >hsa-miR-606 MIMAT0003274 Homo sapiens miR-606
aaacuacugaaaaucaaagau

SEQ ID NO: 1879 - RNA, 21 nt, Artificial sequence
  >hsa-miR-6068 MIMAT0023693 Homo sapiens miR-6068
ccugcgagucuccggcggugg

SEQ ID NO: 1880 - RNA, 21 nt, Artificial sequence
  >hsa-miR-6069 MIMAT0023694 Homo sapiens miR-6069
gggcuagggccugcugccccc

SEQ ID NO: 1881 - RNA, 21 nt, Artificial sequence
  >hsa-miR-607 MIMAT0003275 Homo sapiens miR-607
guucaaauccagaucuauaac

SEQ ID NO: 1882 - RNA, 19 nt, Artificial sequence
  >hsa-miR-6070 MIMAT0023695 Homo sapiens miR-6070
ccgguuccagucccuggag

SEQ ID NO: 1883 - RNA, 19 nt, Artificial sequence
  >hsa-miR-6071 MIMAT0023696 Homo sapiens miR-6071
uucugcugccggccaaggc

SEQ ID NO: 1884 - RNA, 22 nt, Artificial sequence
  >hsa-miR-6072 MIMAT0023697 Homo sapiens miR-6072
uccucaucacacugcaccuuag

SEQ ID NO: 1885 - RNA, 20 nt, Artificial sequence
  >hsa-miR-6073 MIMAT0023698 Homo sapiens miR-6073
gguagugaguuaucagcuac

SEQ ID NO: 1886 - RNA, 20 nt, Artificial sequence
  >hsa-miR-6074 MIMAT0023699 Homo sapiens miR-6074
gauauucagaggcuaggugg

SEQ ID NO: 1887 - RNA, 21 nt, Artificial sequence
  >hsa-miR-6075 MIMAT0023700 Homo sapiens miR-6075
acggcccaggcggcauuggug

SEQ ID NO: 1888 - RNA, 21 nt, Artificial sequence
  >hsa-miR-6076 MIMAT0023701 Homo sapiens miR-6076
agcaugacagaggagaggugg

SEQ ID NO: 1889 - RNA, 21 nt, Artificial sequence
  >hsa-miR-6077 MIMAT0023702 Homo sapiens miR-6077
gggaagagcuguacggccuuc

SEQ ID NO: 1890 - RNA, 19 nt, Artificial sequence
  >hsa-miR-6078 MIMAT0023703 Homo sapiens miR-6078
ccgccugagcuagcugugg

SEQ ID NO: 1891 - RNA, 24 nt, Artificial sequence
  >hsa-miR-6079 MIMAT0023704 Homo sapiens miR-6079
uuggaagcuuggaccaacuagcug

SEQ ID NO: 1892 - RNA, 25 nt, Artificial sequence
  >hsa-miR-608 MIMAT0003276 Homo sapiens miR-608
aggggugguguugggacagcuccgu

SEQ ID NO: 1893 - RNA, 19 nt, Artificial sequence
  >hsa-miR-6080 MIMAT0023705 Homo sapiens miR-6080
ucuagugcgggcguucccg

SEQ ID NO: 1894 - RNA, 24 nt, Artificial sequence
  >hsa-miR-6081 MIMAT0023706 Homo sapiens miR-6081
aggagcagugccggccaaggcgcc

SEQ ID NO: 1895 - RNA, 19 nt, Artificial sequence
  >hsa-miR-6082 MIMAT0023707 Homo sapiens miR-6082
gaauacgucugguugaucc

SEQ ID NO: 1896 - RNA, 20 nt, Artificial sequence
  >hsa-miR-6083 MIMAT0023708 Homo sapiens miR-6083
cuuauaucagaggcuguggg

SEQ ID NO: 1897 - RNA, 20 nt, Artificial sequence
  >hsa-miR-6084 MIMAT0023709 Homo sapiens miR-6084
uuccgccagucgguggccgg

SEQ ID NO: 1898 - RNA, 19 nt, Artificial sequence
  >hsa-miR-6085 MIMAT0023710 Homo sapiens miR-6085
aaggggcugggggagcaca

SEQ ID NO: 1899 - RNA, 20 nt, Artificial sequence
  >hsa-miR-6086 MIMAT0023711 Homo sapiens miR-6086
ggagguugggaagggcagag

SEQ ID NO: 1900 - RNA, 18 nt, Artificial sequence
  >hsa-miR-6087 MIMAT0023712 Homo sapiens miR-6087
ugaggcgggggggcgagc

SEQ ID NO: 1901 - RNA, 20 nt, Artificial sequence
  >hsa-miR-6088 MIMAT0023713 Homo sapiens miR-6088
agagaugaagcgggggggcg

SEQ ID NO: 1902 - RNA, 24 nt, Artificial sequence
  >hsa-miR-6089 MIMAT0023714 Homo sapiens miR-6089
ggaggccgggguggggcggggcgg

SEQ ID NO: 1903 - RNA, 20 nt, Artificial sequence
  >hsa-miR-609 MIMAT0003277 Homo sapiens miR-609
aggguguuucucucaucucu

SEQ ID NO: 1904 - RNA, 19 nt, Artificial sequence
  >hsa-miR-6090 MIMAT0023715 Homo sapiens miR-6090
ggggagcgaggggcggggc

SEQ ID NO: 1905 - RNA, 21 nt, Artificial sequence
  >hsa-miR-610 MIMAT0003278 Homo sapiens miR-610
ugagcuaaaugugugcuggga

SEQ ID NO: 1906 - RNA, 23 nt, Artificial sequence
  >hsa-miR-611 MIMAT0003279 Homo sapiens miR-611
gcgaggaccccucggggucugac

SEQ ID NO: 1907 - RNA, 25 nt, Artificial sequence
  >hsa-miR-612 MIMAT0003280 Homo sapiens miR-612
gcugggcagggcuucugagcuccuu

SEQ ID NO: 1908 - RNA, 20 nt, Artificial sequence
  >hsa-miR-6124 MIMAT0024597 Homo sapiens miR-6124
gggaaaaggaagggggagga

SEQ ID NO: 1909 - RNA, 20 nt, Artificial sequence
  >hsa-miR-6125 MIMAT0024598 Homo sapiens miR-6125
gcggaaggcggagcggcgga

SEQ ID NO: 1910 - RNA, 18 nt, Artificial sequence
  >hsa-miR-6126 MIMAT0024599 Homo sapiens miR-6126
gugaaggcccggcggaga

SEQ ID NO: 1911 - RNA, 19 nt, Artificial sequence
  >hsa-miR-6127 MIMAT0024610 Homo sapiens miR-6127
ugagggagugggugggagg

SEQ ID NO: 1912 - RNA, 19 nt, Artificial sequence
  >hsa-miR-6128 MIMAT0024611 Homo sapiens miR-6128
acuggaauuggagucaaaa

SEQ ID NO: 1913 - RNA, 19 nt, Artificial sequence
  >hsa-miR-6129 MIMAT0024613 Homo sapiens miR-6129
ugagggaguuggguguaua

SEQ ID NO: 1914 - RNA, 20 nt, Artificial sequence
  >hsa-miR-613 MIMAT0003281 Homo sapiens miR-613
aggaauguuccuucuuugcc

SEQ ID NO: 1915 - RNA, 19 nt, Artificial sequence
  >hsa-miR-6130 MIMAT0024614 Homo sapiens miR-6130
ugagggaguggauuguaug

SEQ ID NO: 1916 - RNA, 19 nt, Artificial sequence
  >hsa-miR-6131 MIMAT0024615 Homo sapiens miR-6131
ggcuggucagaugggagug

SEQ ID NO: 1917 - RNA, 19 nt, Artificial sequence
  >hsa-miR-6132 MIMAT0024616 Homo sapiens miR-6132
agcagggcuggggauugca

SEQ ID NO: 1918 - RNA, 19 nt, Artificial sequence
  >hsa-miR-6133 MIMAT0024617 Homo sapiens miR-6133
ugagggaggagguugggua

SEQ ID NO: 1919 - RNA, 19 nt, Artificial sequence
  >hsa-miR-6134 MIMAT0024618 Homo sapiens miR-6134
ugaggugguaggauguaga

SEQ ID NO: 1920 - RNA, 23 nt, Artificial sequence
  >hsa-miR-614 MIMAT0003282 Homo sapiens miR-614
gaacgccuguucuugccaggugg

SEQ ID NO: 1921 - RNA, 22 nt, Artificial sequence
  >hsa-miR-615-3p MIMAT0003283 Homo sapiens miR-615-3p
uccgagccugggucucccucuu

SEQ ID NO: 1922 - RNA, 22 nt, Artificial sequence
  >hsa-miR-615-5p MIMAT0004804 Homo sapiens miR-615-5p
ggggguccccggugcucggauc

SEQ ID NO: 1923 - RNA, 22 nt, Artificial sequence
  >hsa-miR-616-3p MIMAT0004805 Homo sapiens miR-616-3p
agucauuggaggguuugagcag

SEQ ID NO: 1924 - RNA, 22 nt, Artificial sequence
  >hsa-miR-616-5p MIMAT0003284 Homo sapiens miR-616-5p
acucaaaacccuucagugacuu

SEQ ID NO: 1925 - RNA, 19 nt, Artificial sequence
  >hsa-miR-6165 MIMAT0024782 Homo sapiens miR-6165
cagcaggaggugaggggag

SEQ ID NO: 1926 - RNA, 22 nt, Artificial sequence
  >hsa-miR-617 MIMAT0003286 Homo sapiens miR-617
agacuucccauuugaagguggc

SEQ ID NO: 1927 - RNA, 23 nt, Artificial sequence
  >hsa-miR-618 MIMAT0003287 Homo sapiens miR-618
aaacucuacuuguccuucugagu

SEQ ID NO: 1928 - RNA, 24 nt, Artificial sequence
  >hsa-miR-619-3p MIMAT0003288 Homo sapiens miR-619-3p
gaccuggacauguuugugcccagu

SEQ ID NO: 1929 - RNA, 22 nt, Artificial sequence
  >hsa-miR-619-5p MIMAT0026622 Homo sapiens miR-619-5p
gcugggauuacaggcaugagcc

SEQ ID NO: 1930 - RNA, 20 nt, Artificial sequence
  >hsa-miR-620 MIMAT0003289 Homo sapiens miR-620
auggagauagauauagaaau

SEQ ID NO: 1931 - RNA, 21 nt, Artificial sequence
  >hsa-miR-621 MIMAT0003290 Homo sapiens miR-621
ggcuagcaacagcgcuuaccu

SEQ ID NO: 1932 - RNA, 21 nt, Artificial sequence
  >hsa-miR-622 MIMAT0003291 Homo sapiens miR-622
acagucugcugagguuggagc

SEQ ID NO: 1933 - RNA, 23 nt, Artificial sequence
  >hsa-miR-623 MIMAT0003292 Homo sapiens miR-623
aucccuugcaggggcuguugggu

SEQ ID NO: 1934 - RNA, 21 nt, Artificial sequence
  >hsa-miR-624-3p MIMAT0004807 Homo sapiens miR-624-3p
cacaagguauugguauuaccu

SEQ ID NO: 1935 - RNA, 22 nt, Artificial sequence
  >hsa-miR-624-5p MIMAT0003293 Homo sapiens miR-624-5p
uaguaccaguaccuuguguuca

SEQ ID NO: 1936 - RNA, 22 nt, Artificial sequence
  >hsa-miR-625-3p MIMAT0004808 Homo sapiens miR-625-3p
gacuauagaacuuucccccuca

SEQ ID NO: 1937 - RNA, 21 nt, Artificial sequence
  >hsa-miR-625-5p MIMAT0003294 Homo sapiens miR-625-5p
agggggaaaguucuauagucc

SEQ ID NO: 1938 - RNA, 19 nt, Artificial sequence
  >hsa-miR-626 MIMAT0003295 Homo sapiens miR-626
agcugucugaaaaugucuu

SEQ ID NO: 1939 - RNA, 20 nt, Artificial sequence
  >hsa-miR-627-3p MIMAT0026623 Homo sapiens miR-627-3p
ucuuuucuuugagacucacu

SEQ ID NO: 1940 - RNA, 22 nt, Artificial sequence
  >hsa-miR-627-5p MIMAT0003296 Homo sapiens miR-627-5p
gugagucucuaagaaaagagga

SEQ ID NO: 1941 - RNA, 21 nt, Artificial sequence
  >hsa-miR-628-3p MIMAT0003297 Homo sapiens miR-628-3p
ucuaguaagaguggcagucga

SEQ ID NO: 1942 - RNA, 22 nt, Artificial sequence
  >hsa-miR-628-5p MIMAT0004809 Homo sapiens miR-628-5p
augcugacauauuuacuagagg

SEQ ID NO: 1943 - RNA, 22 nt, Artificial sequence
  >hsa-miR-629-3p MIMAT0003298 Homo sapiens miR-629-3p
guucucccaacguaagcccagc

SEQ ID NO: 1944 - RNA, 21 nt, Artificial sequence
  >hsa-miR-629-5p MIMAT0004810 Homo sapiens miR-629-5p
uggguuuacguugggagaacu

SEQ ID NO: 1945 - RNA, 22 nt, Artificial sequence
  >hsa-miR-630 MIMAT0003299 Homo sapiens miR-630
aguauucuguaccagggaaggu

SEQ ID NO: 1946 - RNA, 21 nt, Artificial sequence
  >hsa-miR-631 MIMAT0003300 Homo sapiens miR-631
agaccuggcccagaccucagc

SEQ ID NO: 1947 - RNA, 19 nt, Artificial sequence
  >hsa-miR-632 MIMAT0003302 Homo sapiens miR-632
gugucugcuuccuguggga

SEQ ID NO: 1948 - RNA, 23 nt, Artificial sequence
  >hsa-miR-633 MIMAT0003303 Homo sapiens miR-633
cuaauaguaucuaccacaauaaa

SEQ ID NO: 1949 - RNA, 22 nt, Artificial sequence
  >hsa-miR-634 MIMAT0003304 Homo sapiens miR-634
aaccagcaccccaacuuuggac

SEQ ID NO: 1950 - RNA, 23 nt, Artificial sequence
  >hsa-miR-635 MIMAT0003305 Homo sapiens miR-635
acuugggcacugaaacaaugucc

SEQ ID NO: 1951 - RNA, 23 nt, Artificial sequence
  >hsa-miR-636 MIMAT0003306 Homo sapiens miR-636
ugugcuugcucgucccgcccgca

SEQ ID NO: 1952 - RNA, 24 nt, Artificial sequence
  >hsa-miR-637 MIMAT0003307 Homo sapiens miR-637
acugggggcuuucgggcucugcgu

SEQ ID NO: 1953 - RNA, 25 nt, Artificial sequence
  >hsa-miR-638 MIMAT0003308 Homo sapiens miR-638
agggaucgcgggcggguggcggccu

SEQ ID NO: 1954 - RNA, 23 nt, Artificial sequence
  >hsa-miR-639 MIMAT0003309 Homo sapiens miR-639
aucgcugcgguugcgagcgcugu

SEQ ID NO: 1955 - RNA, 21 nt, Artificial sequence
  >hsa-miR-640 MIMAT0003310 Homo sapiens miR-640
augauccaggaaccugccucu

SEQ ID NO: 1956 - RNA, 24 nt, Artificial sequence
  >hsa-miR-641 MIMAT0003311 Homo sapiens miR-641
aaagacauaggauagagucaccuc

SEQ ID NO: 1957 - RNA, 22 nt, Artificial sequence
  >hsa-miR-642a-3p MIMAT0020924 Homo sapiens miR-642a-3p
agacacauuuggagagggaacc

SEQ ID NO: 1958 - RNA, 22 nt, Artificial sequence
  >hsa-miR-642a-5p MIMAT0003312 Homo sapiens miR-642a-5p
gucccucuccaaaugugucuug

SEQ ID NO: 1959 - RNA, 22 nt, Artificial sequence
  >hsa-miR-642b-3p MIMAT0018444 Homo sapiens miR-642b-3p
agacacauuuggagagggaccc

SEQ ID NO: 1960 - RNA, 22 nt, Artificial sequence
  >hsa-miR-642b-5p MIMAT0022736 Homo sapiens miR-642b-5p
gguucccucuccaaaugugucu

SEQ ID NO: 1961 - RNA, 22 nt, Artificial sequence
  >hsa-miR-643 MIMAT0003313 Homo sapiens miR-643
acuuguaugcuagcucagguag

SEQ ID NO: 1962 - RNA, 19 nt, Artificial sequence
  >hsa-miR-644a MIMAT0003314 Homo sapiens miR-644a
aguguggcuuucuuagagc

SEQ ID NO: 1963 - RNA, 19 nt, Artificial sequence
  >hsa-miR-645 MIMAT0003315 Homo sapiens miR-645
ucuaggcugguacugcuga

SEQ ID NO: 1964 - RNA, 19 nt, Artificial sequence
  >hsa-miR-646 MIMAT0003316 Homo sapiens miR-646
aagcagcugccucugaggc

SEQ ID NO: 1965 - RNA, 21 nt, Artificial sequence
  >hsa-miR-647 MIMAT0003317 Homo sapiens miR-647
guggcugcacucacuuccuuc

SEQ ID NO: 1966 - RNA, 19 nt, Artificial sequence
  >hsa-miR-648 MIMAT0003318 Homo sapiens miR-648
aagugugcagggcacuggu

SEQ ID NO: 1967 - RNA, 22 nt, Artificial sequence
  >hsa-miR-649 MIMAT0003319 Homo sapiens miR-649
aaaccuguguuguucaagaguc

SEQ ID NO: 1968 - RNA, 22 nt, Artificial sequence
  >hsa-miR-6499-3p MIMAT0025451 Homo sapiens miR-6499-3p
agcaguguuuguuuugcccaca

SEQ ID NO: 1969 - RNA, 22 nt, Artificial sequence
  >hsa-miR-6499-5p MIMAT0025450 Homo sapiens miR-6499-5p
ucgggcgcaagagcacugcagu

SEQ ID NO: 1970 - RNA, 21 nt, Artificial sequence
  >hsa-miR-650 MIMAT0003320 Homo sapiens miR-650
aggaggcagcgcucucaggac

SEQ ID NO: 1971 - RNA, 21 nt, Artificial sequence
  >hsa-miR-6500-3p MIMAT0025455 Homo sapiens miR-6500-3p
acacuuguugggaugaccugc

SEQ ID NO: 1972 - RNA, 24 nt, Artificial sequence
  >hsa-miR-6500-5p MIMAT0025454 Homo sapiens miR-6500-5p
aggagcuauccacuccaggugucc

SEQ ID NO: 1973 - RNA, 23 nt, Artificial sequence
  >hsa-miR-6501-3p MIMAT0025459 Homo sapiens miR-6501-3p
ccagagcagccugcgguaacagu

SEQ ID NO: 1974 - RNA, 22 nt, Artificial sequence
  >hsa-miR-6501-5p MIMAT0025458 Homo sapiens miR-6501-5p
aguugccagggcugccuuuggu

SEQ ID NO: 1975 - RNA, 21 nt, Artificial sequence
  >hsa-miR-6502-3p MIMAT0025461 Homo sapiens miR-6502-3p
uagaccaucuuucuagaguau

SEQ ID NO: 1976 - RNA, 22 nt, Artificial sequence
  >hsa-miR-6502-5p MIMAT0025460 Homo sapiens miR-6502-5p
agcucuagaaagauuguugacc

SEQ ID NO: 1977 - RNA, 21 nt, Artificial sequence
  >hsa-miR-6503-3p MIMAT0025463 Homo sapiens miR-6503-3p
gggacuaggaugcagaccucc

SEQ ID NO: 1978 - RNA, 23 nt, Artificial sequence
  >hsa-miR-6503-5p MIMAT0025462 Homo sapiens miR-6503-5p
aggucugcauucaaauccccaga

SEQ ID NO: 1979 - RNA, 20 nt, Artificial sequence
  >hsa-miR-6504-3p MIMAT0025465 Homo sapiens miR-6504-3p
cauuacagcacagccauucu

SEQ ID NO: 1980 - RNA, 21 nt, Artificial sequence
  >hsa-miR-6504-5p MIMAT0025464 Homo sapiens miR-6504-5p
ucuggcugugcuguaaugcag

SEQ ID NO: 1981 - RNA, 21 nt, Artificial sequence
  >hsa-miR-6505-3p MIMAT0025467 Homo sapiens miR-6505-3p
ugacuucuaccucuuccaaag

SEQ ID NO: 1982 - RNA, 22 nt, Artificial sequence
  >hsa-miR-6505-5p MIMAT0025466 Homo sapiens miR-6505-5p
uuggaauaggggauaucucagc

SEQ ID NO: 1983 - RNA, 22 nt, Artificial sequence
  >hsa-miR-6506-3p MIMAT0025469 Homo sapiens miR-6506-3p
ucguaucagagauuccagacac

SEQ ID NO: 1984 - RNA, 23 nt, Artificial sequence
  >hsa-miR-6506-5p MIMAT0025468 Homo sapiens miR-6506-5p
acugggaugucacugaauauggu

SEQ ID NO: 1985 - RNA, 22 nt, Artificial sequence
  >hsa-miR-6507-3p MIMAT0025471 Homo sapiens miR-6507-3p
caaaguccuuccuauuuuuccc

SEQ ID NO: 1986 - RNA, 21 nt, Artificial sequence
  >hsa-miR-6507-5p MIMAT0025470 Homo sapiens miR-6507-5p
gaagaauaggagggacuuugu

SEQ ID NO: 1987 - RNA, 22 nt, Artificial sequence
  >hsa-miR-6508-3p MIMAT0025473 Homo sapiens miR-6508-3p
ugggccaugcauuucuagaacu

SEQ ID NO: 1988 - RNA, 21 nt, Artificial sequence
  >hsa-miR-6508-5p MIMAT0025472 Homo sapiens miR-6508-5p
ucuagaaaugcaugacccacc

SEQ ID NO: 1989 - RNA, 22 nt, Artificial sequence
  >hsa-miR-6509-3p MIMAT0025475 Homo sapiens miR-6509-3p
uuccacugccacuaccuaauuu

SEQ ID NO: 1990 - RNA, 21 nt, Artificial sequence
  >hsa-miR-6509-5p MIMAT0025474 Homo sapiens miR-6509-5p
auuagguaguggcaguggaac

SEQ ID NO: 1991 - RNA, 22 nt, Artificial sequence
  >hsa-miR-651-3p MIMAT0026624 Homo sapiens miR-651-3p
aaaggaaaguguauccuaaaag

SEQ ID NO: 1992 - RNA, 22 nt, Artificial sequence
  >hsa-miR-651-5p MIMAT0003321 Homo sapiens miR-651-5p
uuuaggauaagcuugacuuuug

SEQ ID NO: 1993 - RNA, 21 nt, Artificial sequence
  >hsa-miR-6510-3p MIMAT0025477 Homo sapiens miR-6510-3p
caccgacucugucuccugcag

SEQ ID NO: 1994 - RNA, 22 nt, Artificial sequence
  >hsa-miR-6510-5p MIMAT0025476 Homo sapiens miR-6510-5p
cagcaggggagagagaggaguc

SEQ ID NO: 1995 - RNA, 22 nt, Artificial sequence
  >hsa-miR-6511a-3p MIMAT0025479 Homo sapiens miR-6511a-3p
ccucaccaucccuucugccugc

SEQ ID NO: 1996 - RNA, 23 nt, Artificial sequence
  >hsa-miR-6511a-5p MIMAT0025478 Homo sapiens miR-6511a-5p
caggcagaaguggggcugacagg

SEQ ID NO: 1997 - RNA, 23 nt, Artificial sequence
  >hsa-miR-6511b-3p MIMAT0025848 Homo sapiens miR-6511b-3p
ccucaccaccccuucugccugca

SEQ ID NO: 1998 - RNA, 24 nt, Artificial sequence
  >hsa-miR-6511b-5p MIMAT0025847 Homo sapiens miR-6511b-5p
cugcaggcagaaguggggcugaca

SEQ ID NO: 1999 - RNA, 22 nt, Artificial sequence
  >hsa-miR-6512-3p MIMAT0025481 Homo sapiens miR-6512-3p
uuccagcccuucuaaugguagg

SEQ ID NO: 2000 - RNA, 22 nt, Artificial sequence
  >hsa-miR-6512-5p MIMAT0025480 Homo sapiens miR-6512-5p
uaccauuagaagagcuggaaga

SEQ ID NO: 2001 - RNA, 21 nt, Artificial sequence
  >hsa-miR-6513-3p MIMAT0025483 Homo sapiens miR-6513-3p
ucaagugucaucugucccuag

SEQ ID NO: 2002 - RNA, 23 nt, Artificial sequence
  >hsa-miR-6513-5p MIMAT0025482 Homo sapiens miR-6513-5p
uuugggauugacgccacaugucu

SEQ ID NO: 2003 - RNA, 21 nt, Artificial sequence
  >hsa-miR-6514-3p MIMAT0025485 Homo sapiens miR-6514-3p
cugccuguucuuccacuccag

SEQ ID NO: 2004 - RNA, 23 nt, Artificial sequence
  >hsa-miR-6514-5p MIMAT0025484 Homo sapiens miR-6514-5p
uauggaguggacuuucagcuggc

SEQ ID NO: 2005 - RNA, 20 nt, Artificial sequence
  >hsa-miR-6515-3p MIMAT0025487 Homo sapiens miR-6515-3p
ucucuucaucuaccccccag

SEQ ID NO: 2006 - RNA, 21 nt, Artificial sequence
  >hsa-miR-6515-5p MIMAT0025486 Homo sapiens miR-6515-5p
uuggaggguguggaagacauc

SEQ ID NO: 2007 - RNA, 22 nt, Artificial sequence
  >hsa-miR-6516-3p MIMAT0030418 Homo sapiens miR-6516-3p
aucauguaugauacugcaaaca

SEQ ID NO: 2008 - RNA, 22 nt, Artificial sequence
  >hsa-miR-6516-5p MIMAT0030417 Homo sapiens miR-6516-5p
uuugcaguaacaggugugagca

SEQ ID NO: 2009 - RNA, 21 nt, Artificial sequence
  >hsa-miR-652-3p MIMAT0003322 Homo sapiens miR-652-3p
aauggcgccacuaggguugug

SEQ ID NO: 2010 - RNA, 25 nt, Artificial sequence
  >hsa-miR-652-5p MIMAT0022709 Homo sapiens miR-652-5p
caacccuaggagagggugccauuca

SEQ ID NO: 2011 - RNA, 22 nt, Artificial sequence
  >hsa-miR-653-3p MIMAT0026625 Homo sapiens miR-653-3p
uucacuggaguuuguuucaaua

SEQ ID NO: 2012 - RNA, 21 nt, Artificial sequence
  >hsa-miR-653-5p MIMAT0003328 Homo sapiens miR-653-5p
guguugaaacaaucucuacug

SEQ ID NO: 2013 - RNA, 22 nt, Artificial sequence
  >hsa-miR-654-3p MIMAT0004814 Homo sapiens miR-654-3p
uaugucugcugaccaucaccuu

SEQ ID NO: 2014 - RNA, 22 nt, Artificial sequence
  >hsa-miR-654-5p MIMAT0003330 Homo sapiens miR-654-5p
uggugggccgcagaacaugugc

SEQ ID NO: 2015 - RNA, 22 nt, Artificial sequence
  >hsa-miR-655-3p MIMAT0003331 Homo sapiens miR-655-3p
auaauacaugguuaaccucuuu

SEQ ID NO: 2016 - RNA, 22 nt, Artificial sequence
  >hsa-miR-655-5p MIMAT0026626 Homo sapiens miR-655-5p
agagguuauccguguuauguuc

SEQ ID NO: 2017 - RNA, 21 nt, Artificial sequence
  >hsa-miR-656-3p MIMAT0003332 Homo sapiens miR-656-3p
aauauuauacagucaaccucu

SEQ ID NO: 2018 - RNA, 21 nt, Artificial sequence
  >hsa-miR-656-5p MIMAT0026627 Homo sapiens miR-656-5p
agguugccugugagguguuca

SEQ ID NO: 2019 - RNA, 23 nt, Artificial sequence
  >hsa-miR-657 MIMAT0003335 Homo sapiens miR-657
ggcagguucucacccucucuagg

SEQ ID NO: 2020 - RNA, 25 nt, Artificial sequence
  >hsa-miR-658 MIMAT0003336 Homo sapiens miR-658
ggcggagggaaguagguccguuggu

SEQ ID NO: 2021 - RNA, 22 nt, Artificial sequence
  >hsa-miR-659-3p MIMAT0003337 Homo sapiens miR-659-3p
cuugguucagggagggucccca

SEQ ID NO: 2022 - RNA, 22 nt, Artificial sequence
  >hsa-miR-659-5p MIMAT0022710 Homo sapiens miR-659-5p
aggaccuucccugaaccaagga

SEQ ID NO: 2023 - RNA, 21 nt, Artificial sequence
  >hsa-miR-660-3p MIMAT0022711 Homo sapiens miR-660-3p
accuccugugugcauggauua

SEQ ID NO: 2024 - RNA, 22 nt, Artificial sequence
  >hsa-miR-660-5p MIMAT0003338 Homo sapiens miR-660-5p
uacccauugcauaucggaguug

SEQ ID NO: 2025 - RNA, 24 nt, Artificial sequence
  >hsa-miR-661 MIMAT0003324 Homo sapiens miR-661
ugccugggucucuggccugcgcgu

SEQ ID NO: 2026 - RNA, 21 nt, Artificial sequence
  >hsa-miR-662 MIMAT0003325 Homo sapiens miR-662
ucccacguuguggcccagcag

SEQ ID NO: 2027 - RNA, 22 nt, Artificial sequence
  >hsa-miR-663a MIMAT0003326 Homo sapiens miR-663a
aggcggggcgccgcgggaccgc

SEQ ID NO: 2028 - RNA, 22 nt, Artificial sequence
  >hsa-miR-663b MIMAT0005867 Homo sapiens miR-663b
gguggcccggccgugccugagg

SEQ ID NO: 2029 - RNA, 23 nt, Artificial sequence
  >hsa-miR-664a-3p MIMAT0005949 Homo sapiens miR-664a-3p
uauucauuuauccccagccuaca

SEQ ID NO: 2030 - RNA, 24 nt, Artificial sequence
  >hsa-miR-664a-5p MIMAT0005948 Homo sapiens miR-664a-5p
acuggcuagggaaaaugauuggau

SEQ ID NO: 2031 - RNA, 22 nt, Artificial sequence
  >hsa-miR-664b-3p MIMAT0022272 Homo sapiens miR-664b-3p
uucauuugccucccagccuaca

SEQ ID NO: 2032 - RNA, 24 nt, Artificial sequence
  >hsa-miR-664b-5p MIMAT0022271 Homo sapiens miR-664b-5p
ugggcuaagggagaugauugggua

SEQ ID NO: 2033 - RNA, 20 nt, Artificial sequence
  >hsa-miR-665 MIMAT0004952 Homo sapiens miR-665
accaggaggcugaggccccu

SEQ ID NO: 2034 - RNA, 23 nt, Artificial sequence
  >hsa-miR-668-3p MIMAT0003881 Homo sapiens miR-668-3p
ugucacucggcucggcccacuac

SEQ ID NO: 2035 - RNA, 19 nt, Artificial sequence
  >hsa-miR-668-5p MIMAT0026636 Homo sapiens miR-668-5p
ugcgccucgggugagcaug

SEQ ID NO: 2036 - RNA, 21 nt, Artificial sequence
  >hsa-miR-670-3p MIMAT0026640 Homo sapiens miR-670-3p
uuuccucauauucauucagga

SEQ ID NO: 2037 - RNA, 20 nt, Artificial sequence
  >hsa-miR-670-5p MIMAT0010357 Homo sapiens miR-670-5p
gucccugaguguauguggug

SEQ ID NO: 2038 - RNA, 21 nt, Artificial sequence
  >hsa-miR-671-3p MIMAT0004819 Homo sapiens miR-671-3p
uccgguucucagggcuccacc

SEQ ID NO: 2039 - RNA, 23 nt, Artificial sequence
  >hsa-miR-671-5p MIMAT0003880 Homo sapiens miR-671-5p
aggaagcccuggaggggcuggag

SEQ ID NO: 2040 - RNA, 21 nt, Artificial sequence
  >hsa-miR-6715a-3p MIMAT0025841 Homo sapiens miR-6715a-3p
ccaaaccagucgugccugugg

SEQ ID NO: 2041 - RNA, 22 nt, Artificial sequence
  >hsa-miR-6715b-3p MIMAT0025843 Homo sapiens miR-6715b-3p
cucaaaccggcugugccugugg

SEQ ID NO: 2042 - RNA, 21 nt, Artificial sequence
  >hsa-miR-6715b-5p MIMAT0025842 Homo sapiens miR-6715b-5p
acaggcacgacugguuuggca

SEQ ID NO: 2043 - RNA, 22 nt, Artificial sequence
  >hsa-miR-6716-3p MIMAT0025845 Homo sapiens miR-6716-3p
uccgaacucuccauuccucugc

SEQ ID NO: 2044 - RNA, 20 nt, Artificial sequence
  >hsa-miR-6716-5p MIMAT0025844 Homo sapiens miR-6716-5p
ugggaauggggguaagggcc

SEQ ID NO: 2045 - RNA, 22 nt, Artificial sequence
  >hsa-miR-6717-5p MIMAT0025846 Homo sapiens miR-6717-5p
aggcgauguggggauguagaga

SEQ ID NO: 2046 - RNA, 21 nt, Artificial sequence
  >hsa-miR-6718-5p MIMAT0025849 Homo sapiens miR-6718-5p
uaguggucagagggcuuauga

SEQ ID NO: 2047 - RNA, 22 nt, Artificial sequence
  >hsa-miR-6719-3p MIMAT0025850 Homo sapiens miR-6719-3p
ucugacaucagugauucuccug

SEQ ID NO: 2048 - RNA, 22 nt, Artificial sequence
  >hsa-miR-6720-3p MIMAT0025851 Homo sapiens miR-6720-3p
cgcgccugcaggaacugguaga

SEQ ID NO: 2049 - RNA, 23 nt, Artificial sequence
  >hsa-miR-6720-5p MIMAT0027345 Homo sapiens miR-6720-5p
uuccagcccugguaggcgccgcg

SEQ ID NO: 2050 - RNA, 23 nt, Artificial sequence
  >hsa-miR-6721-5p MIMAT0025852 Homo sapiens miR-6721-5p
ugggcaggggcuuauuguaggag

SEQ ID NO: 2051 - RNA, 22 nt, Artificial sequence
  >hsa-miR-6722-3p MIMAT0025854 Homo sapiens miR-6722-3p
ugcaggggucgggugggccagg

SEQ ID NO: 2052 - RNA, 20 nt, Artificial sequence
  >hsa-miR-6722-5p MIMAT0025853 Homo sapiens miR-6722-5p
aggcgcacccgaccacaugc

SEQ ID NO: 2053 - RNA, 22 nt, Artificial sequence
  >hsa-miR-6723-5p MIMAT0025855 Homo sapiens miR-6723-5p
auaguccgaguaacgucggggc

SEQ ID NO: 2054 - RNA, 23 nt, Artificial sequence
  >hsa-miR-6724-5p MIMAT0025856 Homo sapiens miR-6724-5p
cugggcccgcggcgggcgugggg

SEQ ID NO: 2055 - RNA, 20 nt, Artificial sequence
  >hsa-miR-6726-3p MIMAT0027354 Homo sapiens miR-6726-3p
cucgcccugucucccgcuag

SEQ ID NO: 2056 - RNA, 21 nt, Artificial sequence
  >hsa-miR-6726-5p MIMAT0027353 Homo sapiens miR-6726-5p
cgggagcuggggucugcaggu

SEQ ID NO: 2057 - RNA, 20 nt, Artificial sequence
  >hsa-miR-6727-3p MIMAT0027356 Homo sapiens miR-6727-3p
uccugccaccuccuccgcag

SEQ ID NO: 2058 - RNA, 23 nt, Artificial sequence
  >hsa-miR-6727-5p MIMAT0027355 Homo sapiens miR-6727-5p
cucggggcaggcggcugggagcg

SEQ ID NO: 2059 - RNA, 21 nt, Artificial sequence
  >hsa-miR-6728-3p MIMAT0027358 Homo sapiens miR-6728-3p
ucucugcucugcucuccccag

SEQ ID NO: 2060 - RNA, 23 nt, Artificial sequence
  >hsa-miR-6728-5p MIMAT0027357 Homo sapiens miR-6728-5p
uugggaugguaggaccagagggg

SEQ ID NO: 2061 - RNA, 21 nt, Artificial sequence
  >hsa-miR-6729-3p MIMAT0027360 Homo sapiens miR-6729-3p
ucaucccccucgcccucucag

SEQ ID NO: 2062 - RNA, 22 nt, Artificial sequence
  >hsa-miR-6729-5p MIMAT0027359 Homo sapiens miR-6729-5p
ugggcgagggcggcugagcggc

SEQ ID NO: 2063 - RNA, 22 nt, Artificial sequence
  >hsa-miR-6730-3p MIMAT0027362 Homo sapiens miR-6730-3p
ccugacaccccaucugcccuca

SEQ ID NO: 2064 - RNA, 23 nt, Artificial sequence
  >hsa-miR-6730-5p MIMAT0027361 Homo sapiens miR-6730-5p
agaaagguggagggguugucaga

SEQ ID NO: 2065 - RNA, 21 nt, Artificial sequence
  >hsa-miR-6731-3p MIMAT0027364 Homo sapiens miR-6731-3p
ucuauuccccacucuccccag

SEQ ID NO: 2066 - RNA, 22 nt, Artificial sequence
  >hsa-miR-6731-5p MIMAT0027363 Homo sapiens miR-6731-5p
ugggagagcaggguauugugga

SEQ ID NO: 2067 - RNA, 23 nt, Artificial sequence
  >hsa-miR-6732-3p MIMAT0027366 Homo sapiens miR-6732-3p
uaacccuguccucucccucccag

SEQ ID NO: 2068 - RNA, 20 nt, Artificial sequence
  >hsa-miR-6732-5p MIMAT0027365 Homo sapiens miR-6732-5p
uaggggguggcaggcuggcc

SEQ ID NO: 2069 - RNA, 20 nt, Artificial sequence
  >hsa-miR-6733-3p MIMAT0027368 Homo sapiens miR-6733-3p
ucagugucuggauuuccuag

SEQ ID NO: 2070 - RNA, 22 nt, Artificial sequence
  >hsa-miR-6733-5p MIMAT0027367 Homo sapiens miR-6733-5p
ugggaaagacaaacucagaguu

SEQ ID NO: 2071 - RNA, 23 nt, Artificial sequence
  >hsa-miR-6734-3p MIMAT0027370 Homo sapiens miR-6734-3p
cccuucccucacucuucucucag

SEQ ID NO: 2072 - RNA, 23 nt, Artificial sequence
  >hsa-miR-6734-5p MIMAT0027369 Homo sapiens miR-6734-5p
uugaggggagaaugagguggaga

SEQ ID NO: 2073 - RNA, 22 nt, Artificial sequence
  >hsa-miR-6735-3p MIMAT0027372 Homo sapiens miR-6735-3p
aggccuguggcuccucccucag

SEQ ID NO: 2074 - RNA, 25 nt, Artificial sequence
  >hsa-miR-6735-5p MIMAT0027371 Homo sapiens miR-6735-5p
cagggcagagggcacaggaaucuga

SEQ ID NO: 2075 - RNA, 21 nt, Artificial sequence
  >hsa-miR-6736-3p MIMAT0027374 Homo sapiens miR-6736-3p
ucagcuccucucuacccacag

SEQ ID NO: 2076 - RNA, 21 nt, Artificial sequence
  >hsa-miR-6736-5p MIMAT0027373 Homo sapiens miR-6736-5p
cugggugagggcaucuguggu

SEQ ID NO: 2077 - RNA, 22 nt, Artificial sequence
  >hsa-miR-6737-3p MIMAT0027376 Homo sapiens miR-6737-3p
ucugugcuucaccccuacccag

SEQ ID NO: 2078 - RNA, 21 nt, Artificial sequence
  >hsa-miR-6737-5p MIMAT0027375 Homo sapiens miR-6737-5p
uugggguggucggcccuggag

SEQ ID NO: 2079 - RNA, 24 nt, Artificial sequence
  >hsa-miR-6738-3p MIMAT0027378 Homo sapiens miR-6738-3p
cuucugccugcauucuacucccag

SEQ ID NO: 2080 - RNA, 23 nt, Artificial sequence
  >hsa-miR-6738-5p MIMAT0027377 Homo sapiens miR-6738-5p
cgagggguagaagagcacagggg

SEQ ID NO: 2081 - RNA, 21 nt, Artificial sequence
  >hsa-miR-6739-3p MIMAT0027380 Homo sapiens miR-6739-3p
auuguucugucuuucucccag

SEQ ID NO: 2082 - RNA, 22 nt, Artificial sequence
  >hsa-miR-6739-5p MIMAT0027379 Homo sapiens miR-6739-5p
ugggaaagagaaagaacaagua

SEQ ID NO: 2083 - RNA, 22 nt, Artificial sequence
  >hsa-miR-6740-3p MIMAT0027382 Homo sapiens miR-6740-3p
ugucuucucuccucccaaacag

SEQ ID NO: 2084 - RNA, 22 nt, Artificial sequence
  >hsa-miR-6740-5p MIMAT0027381 Homo sapiens miR-6740-5p
aguuugggauggagagaggaga

SEQ ID NO: 2085 - RNA, 22 nt, Artificial sequence
  >hsa-miR-6741-3p MIMAT0027384 Homo sapiens miR-6741-3p
ucggcucucucccucacccuag

SEQ ID NO: 2086 - RNA, 22 nt, Artificial sequence
  >hsa-miR-6741-5p MIMAT0027383 Homo sapiens miR-6741-5p
gugggugcuggugggagccgug

SEQ ID NO: 2087 - RNA, 20 nt, Artificial sequence
  >hsa-miR-6742-3p MIMAT0027386 Homo sapiens miR-6742-3p
accuggguuguccccucuag

SEQ ID NO: 2088 - RNA, 22 nt, Artificial sequence
  >hsa-miR-6742-5p MIMAT0027385 Homo sapiens miR-6742-5p
aguggggugggacccagcuguu

SEQ ID NO: 2089 - RNA, 23 nt, Artificial sequence
  >hsa-miR-6743-3p MIMAT0027388 Homo sapiens miR-6743-3p
agccgcucuucucccugcccaca

SEQ ID NO: 2090 - RNA, 22 nt, Artificial sequence
  >hsa-miR-6743-5p MIMAT0027387 Homo sapiens miR-6743-5p
aaggggcagggacggguggccc

SEQ ID NO: 2091 - RNA, 23 nt, Artificial sequence
  >hsa-miR-6744-3p MIMAT0027390 Homo sapiens miR-6744-3p
gggccucucuugucauccugcag

SEQ ID NO: 2092 - RNA, 19 nt, Artificial sequence
  >hsa-miR-6744-5p MIMAT0027389 Homo sapiens miR-6744-5p
uggaugacaguggaggccu

SEQ ID NO: 2093 - RNA, 21 nt, Artificial sequence
  >hsa-miR-6745 MIMAT0027391 Homo sapiens miR-6745
uggguggaagaaggucugguu

SEQ ID NO: 2094 - RNA, 22 nt, Artificial sequence
  >hsa-miR-6746-3p MIMAT0027393 Homo sapiens miR-6746-3p
cagccgccgccugucuccacag

SEQ ID NO: 2095 - RNA, 22 nt, Artificial sequence
  >hsa-miR-6746-5p MIMAT0027392 Homo sapiens miR-6746-5p
ccgggagaaggagguggccugg

SEQ ID NO: 2096 - RNA, 21 nt, Artificial sequence
  >hsa-miR-6747-3p MIMAT0027395 Homo sapiens miR-6747-3p
uccugccuuccucugcaccag

SEQ ID NO: 2097 - RNA, 24 nt, Artificial sequence
  >hsa-miR-6747-5p MIMAT0027394 Homo sapiens miR-6747-5p
agggguguggaaagaggcagaaca

SEQ ID NO: 2098 - RNA, 21 nt, Artificial sequence
  >hsa-miR-6748-3p MIMAT0027397 Homo sapiens miR-6748-3p
uccugucccugucuccuacag

SEQ ID NO: 2099 - RNA, 22 nt, Artificial sequence
  >hsa-miR-6748-5p MIMAT0027396 Homo sapiens miR-6748-5p
ugugggugggaaggacuggauu

SEQ ID NO: 2100 - RNA, 21 nt, Artificial sequence
  >hsa-miR-6749-3p MIMAT0027399 Homo sapiens miR-6749-3p
cuccuccccugccuggcccag

SEQ ID NO: 2101 - RNA, 22 nt, Artificial sequence
  >hsa-miR-6749-5p MIMAT0027398 Homo sapiens miR-6749-5p
ucgggccugggguugggggagc

SEQ ID NO: 2102 - RNA, 20 nt, Artificial sequence
  >hsa-miR-675-3p MIMAT0006790 Homo sapiens miR-675-3p
cuguaugcccucaccgcuca

SEQ ID NO: 2103 - RNA, 23 nt, Artificial sequence
  >hsa-miR-675-5p MIMAT0004284 Homo sapiens miR-675-5p
uggugcggagagggcccacagug

SEQ ID NO: 2104 - RNA, 21 nt, Artificial sequence
  >hsa-miR-6750-3p MIMAT0027401 Homo sapiens miR-6750-3p
gaacucacccucugcucccag

SEQ ID NO: 2105 - RNA, 24 nt, Artificial sequence
  >hsa-miR-6750-5p MIMAT0027400 Homo sapiens miR-6750-5p
cagggaacagcugggugagcugcu

SEQ ID NO: 2106 - RNA, 21 nt, Artificial sequence
  >hsa-miR-6751-3p MIMAT0027403 Homo sapiens miR-6751-3p
acugagccucucucucuccag

SEQ ID NO: 2107 - RNA, 23 nt, Artificial sequence
  >hsa-miR-6751-5p MIMAT0027402 Homo sapiens miR-6751-5p
uugggggugagguuggugucugg

SEQ ID NO: 2108 - RNA, 21 nt, Artificial sequence
  >hsa-miR-6752-3p MIMAT0027405 Homo sapiens miR-6752-3p
ucccugcccccauacucccag

SEQ ID NO: 2109 - RNA, 22 nt, Artificial sequence
  >hsa-miR-6752-5p MIMAT0027404 Homo sapiens miR-6752-5p
gggggguguggagccagggggc

SEQ ID NO: 2110 - RNA, 22 nt, Artificial sequence
  >hsa-miR-6753-3p MIMAT0027407 Homo sapiens miR-6753-3p
uggucugucucugcccuggcac

SEQ ID NO: 2111 - RNA, 22 nt, Artificial sequence
  >hsa-miR-6753-5p MIMAT0027406 Homo sapiens miR-6753-5p
caccagggcagagcagggcuga

SEQ ID NO: 2112 - RNA, 22 nt, Artificial sequence
  >hsa-miR-6754-3p MIMAT0027409 Homo sapiens miR-6754-3p
ucuucaccugccucugccugca

SEQ ID NO: 2113 - RNA, 22 nt, Artificial sequence
  >hsa-miR-6754-5p MIMAT0027408 Homo sapiens miR-6754-5p
ccagggaggcugguuuggagga

SEQ ID NO: 2114 - RNA, 22 nt, Artificial sequence
  >hsa-miR-6755-3p MIMAT0027411 Homo sapiens miR-6755-3p
uguugucauguuuuuucccuag

SEQ ID NO: 2115 - RNA, 22 nt, Artificial sequence
  >hsa-miR-6755-5p MIMAT0027410 Homo sapiens miR-6755-5p
uaggguagacacugacaacguu

SEQ ID NO: 2116 - RNA, 20 nt, Artificial sequence
  >hsa-miR-6756-3p MIMAT0027413 Homo sapiens miR-6756-3p
uccccuuccucccugcccag

SEQ ID NO: 2117 - RNA, 23 nt, Artificial sequence
  >hsa-miR-6756-5p MIMAT0027412 Homo sapiens miR-6756-5p
aggguggggcuggagguggggcu

SEQ ID NO: 2118 - RNA, 22 nt, Artificial sequence
  >hsa-miR-6757-3p MIMAT0027415 Homo sapiens miR-6757-3p
aacacuggccuugcuaucccca

SEQ ID NO: 2119 - RNA, 22 nt, Artificial sequence
  >hsa-miR-6757-5p MIMAT0027414 Homo sapiens miR-6757-5p
uagggaugggaggccaggauga

SEQ ID NO: 2120 - RNA, 20 nt, Artificial sequence
  >hsa-miR-6758-3p MIMAT0027417 Homo sapiens miR-6758-3p
acucauucuccucuguccag

SEQ ID NO: 2121 - RNA, 23 nt, Artificial sequence
  >hsa-miR-6758-5p MIMAT0027416 Homo sapiens miR-6758-5p
uagagaggggaaggaugugaugu

SEQ ID NO: 2122 - RNA, 22 nt, Artificial sequence
  >hsa-miR-6759-3p MIMAT0027419 Homo sapiens miR-6759-3p
ugaccuuugccucuccccucag

SEQ ID NO: 2123 - RNA, 22 nt, Artificial sequence
  >hsa-miR-6759-5p MIMAT0027418 Homo sapiens miR-6759-5p
uugugggugggcagaagucugu

SEQ ID NO: 2124 - RNA, 21 nt, Artificial sequence
  >hsa-miR-676-3p MIMAT0018204 Homo sapiens miR-676-3p
cuguccuaagguuguugaguu

SEQ ID NO: 2125 - RNA, 21 nt, Artificial sequence
  >hsa-miR-676-5p MIMAT0018203 Homo sapiens miR-676-5p
ucuucaaccucaggacuugca

SEQ ID NO: 2126 - RNA, 21 nt, Artificial sequence
  >hsa-miR-6760-3p MIMAT0027421 Homo sapiens miR-6760-3p
acacuguccccuucuccccag

SEQ ID NO: 2127 - RNA, 23 nt, Artificial sequence
  >hsa-miR-6760-5p MIMAT0027420 Homo sapiens miR-6760-5p
cagggagaagguggaagugcaga

SEQ ID NO: 2128 - RNA, 22 nt, Artificial sequence
  >hsa-miR-6761-3p MIMAT0027423 Homo sapiens miR-6761-3p
uccuacgcugcucucucacucc

SEQ ID NO: 2129 - RNA, 21 nt, Artificial sequence
  >hsa-miR-6761-5p MIMAT0027422 Homo sapiens miR-6761-5p
ucugagagagcucgauggcag

SEQ ID NO: 2130 - RNA, 23 nt, Artificial sequence
  >hsa-miR-6762-3p MIMAT0027425 Homo sapiens miR-6762-3p
uggcugcuucccuuggucuccag

SEQ ID NO: 2131 - RNA, 23 nt, Artificial sequence
  >hsa-miR-6762-5p MIMAT0027424 Homo sapiens miR-6762-5p
cggggccauggagcagccugugu

SEQ ID NO: 2132 - RNA, 21 nt, Artificial sequence
  >hsa-miR-6763-3p MIMAT0027427 Homo sapiens miR-6763-3p
cuccccggccucugcccccag

SEQ ID NO: 2133 - RNA, 19 nt, Artificial sequence
  >hsa-miR-6763-5p MIMAT0027426 Homo sapiens miR-6763-5p
cuggggaguggcuggggag

SEQ ID NO: 2134 - RNA, 21 nt, Artificial sequence
  >hsa-miR-6764-3p MIMAT0027429 Homo sapiens miR-6764-3p
ucucuggucuuuccuugacag

SEQ ID NO: 2135 - RNA, 22 nt, Artificial sequence
  >hsa-miR-6764-5p MIMAT0027428 Homo sapiens miR-6764-5p
ucccagggucuggucagaguug

SEQ ID NO: 2136 - RNA, 21 nt, Artificial sequence
  >hsa-miR-6765-3p MIMAT0027431 Homo sapiens miR-6765-3p
ucaccuggcuggcccgcccag

SEQ ID NO: 2137 - RNA, 25 nt, Artificial sequence
  >hsa-miR-6765-5p MIMAT0027430 Homo sapiens miR-6765-5p
gugaggcggggccaggagggugugu

SEQ ID NO: 2138 - RNA, 22 nt, Artificial sequence
  >hsa-miR-6766-3p MIMAT0027433 Homo sapiens miR-6766-3p
ugauugucuucccccacccuca

SEQ ID NO: 2139 - RNA, 24 nt, Artificial sequence
  >hsa-miR-6766-5p MIMAT0027432 Homo sapiens miR-6766-5p
cgggugggagcagaucuuauugag

SEQ ID NO: 2140 - RNA, 22 nt, Artificial sequence
  >hsa-miR-6767-3p MIMAT0027435 Homo sapiens miR-6767-3p
ccacgugcuucucuuuccgcag

SEQ ID NO: 2141 - RNA, 23 nt, Artificial sequence
  >hsa-miR-6767-5p MIMAT0027434 Homo sapiens miR-6767-5p
ucgcagacagggacacauggaga

SEQ ID NO: 2142 - RNA, 24 nt, Artificial sequence
  >hsa-miR-6768-3p MIMAT0027437 Homo sapiens miR-6768-3p
caaaggccacauucuccugugcac

SEQ ID NO: 2143 - RNA, 23 nt, Artificial sequence
  >hsa-miR-6768-5p MIMAT0027436 Homo sapiens miR-6768-5p
cacacaggaaaagcggggcccug

SEQ ID NO: 2144 - RNA, 21 nt, Artificial sequence
  >hsa-miR-6769a-3p MIMAT0027439 Homo sapiens miR-6769a-3p
gagccccucucugcucuccag

SEQ ID NO: 2145 - RNA, 21 nt, Artificial sequence
  >hsa-miR-6769a-5p MIMAT0027438 Homo sapiens miR-6769a-5p
agguggguauggaggagcccu

SEQ ID NO: 2146 - RNA, 21 nt, Artificial sequence
  >hsa-miR-6769b-3p MIMAT0027621 Homo sapiens miR-6769b-3p
cccucucugucccacccauag

SEQ ID NO: 2147 - RNA, 23 nt, Artificial sequence
  >hsa-miR-6769b-5p MIMAT0027620 Homo sapiens miR-6769b-5p
ugguggguggggaggagaagugc

SEQ ID NO: 2148 - RNA, 21 nt, Artificial sequence
  >hsa-miR-6770-3p MIMAT0027441 Homo sapiens miR-6770-3p
cuggcggcugugucuucacag

SEQ ID NO: 2149 - RNA, 24 nt, Artificial sequence
  >hsa-miR-6770-5p MIMAT0027440 Homo sapiens miR-6770-5p
ugagaaggcacagcuugcacguga

SEQ ID NO: 2150 - RNA, 21 nt, Artificial sequence
  >hsa-miR-6771-3p MIMAT0027443 Homo sapiens miR-6771-3p
caaaccccugucuacccgcag

SEQ ID NO: 2151 - RNA, 22 nt, Artificial sequence
  >hsa-miR-6771-5p MIMAT0027442 Homo sapiens miR-6771-5p
cucgggagggcaugggccaggc

SEQ ID NO: 2152 - RNA, 23 nt, Artificial sequence
  >hsa-miR-6772-3p MIMAT0027445 Homo sapiens miR-6772-3p
uugcuccugacucugugcccaca

SEQ ID NO: 2153 - RNA, 22 nt, Artificial sequence
  >hsa-miR-6772-5p MIMAT0027444 Homo sapiens miR-6772-5p
uggguguaggcuggagcugagg

SEQ ID NO: 2154 - RNA, 22 nt, Artificial sequence
  >hsa-miR-6773-3p MIMAT0027447 Homo sapiens miR-6773-3p
acugucacuucucugcccauag

SEQ ID NO: 2155 - RNA, 23 nt, Artificial sequence
  >hsa-miR-6773-5p MIMAT0027446 Homo sapiens miR-6773-5p
uugggcccaggaguaaacaggau

SEQ ID NO: 2156 - RNA, 21 nt, Artificial sequence
  >hsa-miR-6774-3p MIMAT0027449 Homo sapiens miR-6774-3p
ucgugucccucuuguccacag

SEQ ID NO: 2157 - RNA, 25 nt, Artificial sequence
  >hsa-miR-6774-5p MIMAT0027448 Homo sapiens miR-6774-5p
acuugggcaggagggacccuguaug

SEQ ID NO: 2158 - RNA, 21 nt, Artificial sequence
  >hsa-miR-6775-3p MIMAT0027451 Homo sapiens miR-6775-3p
aggcccuguccucugccccag

SEQ ID NO: 2159 - RNA, 25 nt, Artificial sequence
  >hsa-miR-6775-5p MIMAT0027450 Homo sapiens miR-6775-5p
ucggggcaugggggagggaggcugg

SEQ ID NO: 2160 - RNA, 23 nt, Artificial sequence
  >hsa-miR-6776-3p MIMAT0027453 Homo sapiens miR-6776-3p
caaccaccacugucucuccccag

SEQ ID NO: 2161 - RNA, 19 nt, Artificial sequence
  >hsa-miR-6776-5p MIMAT0027452 Homo sapiens miR-6776-5p
ucugggugcaguggggguu

SEQ ID NO: 2162 - RNA, 20 nt, Artificial sequence
  >hsa-miR-6777-3p MIMAT0027455 Homo sapiens miR-6777-3p
uccacucuccuggcccccag

SEQ ID NO: 2163 - RNA, 23 nt, Artificial sequence
  >hsa-miR-6777-5p MIMAT0027454 Homo sapiens miR-6777-5p
acggggagucaggcaguggugga

SEQ ID NO: 2164 - RNA, 21 nt, Artificial sequence
  >hsa-miR-6778-3p MIMAT0027457 Homo sapiens miR-6778-3p
ugccucccugacauuccacag

SEQ ID NO: 2165 - RNA, 22 nt, Artificial sequence
  >hsa-miR-6778-5p MIMAT0027456 Homo sapiens miR-6778-5p
agugggaggacaggaggcaggu

SEQ ID NO: 2166 - RNA, 21 nt, Artificial sequence
  >hsa-miR-6779-3p MIMAT0027459 Homo sapiens miR-6779-3p
aagcccugucuccucccaucu

SEQ ID NO: 2167 - RNA, 21 nt, Artificial sequence
  >hsa-miR-6779-5p MIMAT0027458 Homo sapiens miR-6779-5p
cugggaggggcuggguuuggc

SEQ ID NO: 2168 - RNA, 21 nt, Artificial sequence
  >hsa-miR-6780a-3p MIMAT0027461 Homo sapiens miR-6780a-3p
cuccucuguuuucuuuccuag

SEQ ID NO: 2169 - RNA, 23 nt, Artificial sequence
  >hsa-miR-6780a-5p MIMAT0027460 Homo sapiens miR-6780a-5p
uugggagggaagacagcuggaga

SEQ ID NO: 2170 - RNA, 21 nt, Artificial sequence
  >hsa-miR-6780b-3p MIMAT0027573 Homo sapiens miR-6780b-3p
ucccuugucuccuuucccuag

SEQ ID NO: 2171 - RNA, 23 nt, Artificial sequence
  >hsa-miR-6780b-5p MIMAT0027572 Homo sapiens miR-6780b-5p
uggggaaggcuuggcagggaaga

SEQ ID NO: 2172 - RNA, 22 nt, Artificial sequence
  >hsa-miR-6781-3p MIMAT0027463 Homo sapiens miR-6781-3p
ugccucuuuuccacggccucag

SEQ ID NO: 2173 - RNA, 21 nt, Artificial sequence
  >hsa-miR-6781-5p MIMAT0027462 Homo sapiens miR-6781-5p
cgggccggaggucaagggcgu

SEQ ID NO: 2174 - RNA, 23 nt, Artificial sequence
  >hsa-miR-6782-3p MIMAT0027465 Homo sapiens miR-6782-3p
caccuuuguguccccauccugca

SEQ ID NO: 2175 - RNA, 25 nt, Artificial sequence
  >hsa-miR-6782-5p MIMAT0027464 Homo sapiens miR-6782-5p
uaggggugggggaauucaggggugu

SEQ ID NO: 2176 - RNA, 22 nt, Artificial sequence
  >hsa-miR-6783-3p MIMAT0027467 Homo sapiens miR-6783-3p
uuccugggcuucuccucuguag

SEQ ID NO: 2177 - RNA, 22 nt, Artificial sequence
  >hsa-miR-6783-5p MIMAT0027466 Homo sapiens miR-6783-5p
uaggggaaaaguccugauccgg

SEQ ID NO: 2178 - RNA, 22 nt, Artificial sequence
  >hsa-miR-6784-3p MIMAT0027469 Homo sapiens miR-6784-3p
ucucaccccaacucugccccag

SEQ ID NO: 2179 - RNA, 20 nt, Artificial sequence
  >hsa-miR-6784-5p MIMAT0027468 Homo sapiens miR-6784-5p
gccggggcuuugggugaggg

SEQ ID NO: 2180 - RNA, 21 nt, Artificial sequence
  >hsa-miR-6785-3p MIMAT0027471 Homo sapiens miR-6785-3p
acaucgccccaccuuccccag

SEQ ID NO: 2181 - RNA, 22 nt, Artificial sequence
  >hsa-miR-6785-5p MIMAT0027470 Homo sapiens miR-6785-5p
ugggagggcguggaugauggug

SEQ ID NO: 2182 - RNA, 23 nt, Artificial sequence
  >hsa-miR-6786-3p MIMAT0027473 Homo sapiens miR-6786-3p
ugacgccccuucugauucugccu

SEQ ID NO: 2183 - RNA, 21 nt, Artificial sequence
  >hsa-miR-6786-5p MIMAT0027472 Homo sapiens miR-6786-5p
gcgguggggccggaggggcgu

SEQ ID NO: 2184 - RNA, 22 nt, Artificial sequence
  >hsa-miR-6787-3p MIMAT0027475 Homo sapiens miR-6787-3p
ucucagcugcugcccucuccag

SEQ ID NO: 2185 - RNA, 22 nt, Artificial sequence
  >hsa-miR-6787-5p MIMAT0027474 Homo sapiens miR-6787-5p
uggcggggguagagcuggcugc

SEQ ID NO: 2186 - RNA, 22 nt, Artificial sequence
  >hsa-miR-6788-3p MIMAT0027477 Homo sapiens miR-6788-3p
uucgccacuucccucccugcag

SEQ ID NO: 2187 - RNA, 21 nt, Artificial sequence
  >hsa-miR-6788-5p MIMAT0027476 Homo sapiens miR-6788-5p
cugggagaagaguggugaaga

SEQ ID NO: 2188 - RNA, 21 nt, Artificial sequence
  >hsa-miR-6789-3p MIMAT0027479 Homo sapiens miR-6789-3p
cggcgcccgugucuccuccag

SEQ ID NO: 2189 - RNA, 24 nt, Artificial sequence
  >hsa-miR-6789-5p MIMAT0027478 Homo sapiens miR-6789-5p
guaggggcgucccgggcgcgcggg

SEQ ID NO: 2190 - RNA, 21 nt, Artificial sequence
  >hsa-miR-6790-3p MIMAT0027481 Homo sapiens miR-6790-3p
cgaccucggcgaccccucacu

SEQ ID NO: 2191 - RNA, 23 nt, Artificial sequence
  >hsa-miR-6790-5p MIMAT0027480 Homo sapiens miR-6790-5p
gugaguguggauuuggcgggguu

SEQ ID NO: 2192 - RNA, 21 nt, Artificial sequence
  >hsa-miR-6791-3p MIMAT0027483 Homo sapiens miR-6791-3p
ugccuccuuggucuccggcag

SEQ ID NO: 2193 - RNA, 22 nt, Artificial sequence
  >hsa-miR-6791-5p MIMAT0027482 Homo sapiens miR-6791-5p
ccccuggggcugggcaggcgga

SEQ ID NO: 2194 - RNA, 22 nt, Artificial sequence
  >hsa-miR-6792-3p MIMAT0027485 Homo sapiens miR-6792-3p
cuccuccacagccccugcucau

SEQ ID NO: 2195 - RNA, 21 nt, Artificial sequence
  >hsa-miR-6792-5p MIMAT0027484 Homo sapiens miR-6792-5p
guaagcaggggcucuggguga

SEQ ID NO: 2196 - RNA, 20 nt, Artificial sequence
  >hsa-miR-6793-3p MIMAT0027487 Homo sapiens miR-6793-3p
uccccaaccccugcccgcag

SEQ ID NO: 2197 - RNA, 22 nt, Artificial sequence
  >hsa-miR-6793-5p MIMAT0027486 Homo sapiens miR-6793-5p
uguggguucuggguugggguga

SEQ ID NO: 2198 - RNA, 20 nt, Artificial sequence
  >hsa-miR-6794-3p MIMAT0027489 Homo sapiens miR-6794-3p
cucacucucagucccucccu

SEQ ID NO: 2199 - RNA, 20 nt, Artificial sequence
  >hsa-miR-6794-5p MIMAT0027488 Homo sapiens miR-6794-5p
cagggggacugggggugagc

SEQ ID NO: 2200 - RNA, 21 nt, Artificial sequence
  >hsa-miR-6795-3p MIMAT0027491 Homo sapiens miR-6795-3p
accccucguuucuucccccag

SEQ ID NO: 2201 - RNA, 24 nt, Artificial sequence
  >hsa-miR-6795-5p MIMAT0027490 Homo sapiens miR-6795-5p
uggggggacaggaugagaggcugu

SEQ ID NO: 2202 - RNA, 21 nt, Artificial sequence
  >hsa-miR-6796-3p MIMAT0027493 Homo sapiens miR-6796-3p
gaagcucuccccuccccgcag

SEQ ID NO: 2203 - RNA, 23 nt, Artificial sequence
  >hsa-miR-6796-5p MIMAT0027492 Homo sapiens miR-6796-5p
uugugggguuggagagcuggcug

SEQ ID NO: 2204 - RNA, 22 nt, Artificial sequence
  >hsa-miR-6797-3p MIMAT0027495 Homo sapiens miR-6797-3p
ugcaugacccuucccuccccac

SEQ ID NO: 2205 - RNA, 25 nt, Artificial sequence
  >hsa-miR-6797-5p MIMAT0027494 Homo sapiens miR-6797-5p
aggagggaaggggcugagaacagga

SEQ ID NO: 2206 - RNA, 21 nt, Artificial sequence
  >hsa-miR-6798-3p MIMAT0027497 Homo sapiens miR-6798-3p
cuaccccccaucccccuguag

SEQ ID NO: 2207 - RNA, 23 nt, Artificial sequence
  >hsa-miR-6798-5p MIMAT0027496 Homo sapiens miR-6798-5p
ccagggggaugggcgagcuuggg

SEQ ID NO: 2208 - RNA, 23 nt, Artificial sequence
  >hsa-miR-6799-3p MIMAT0027499 Homo sapiens miR-6799-3p
ugcccugcaugguguccccacag

SEQ ID NO: 2209 - RNA, 20 nt, Artificial sequence
  >hsa-miR-6799-5p MIMAT0027498 Homo sapiens miR-6799-5p
ggggaggugugcagggcugg

SEQ ID NO: 2210 - RNA, 21 nt, Artificial sequence
  >hsa-miR-6800-3p MIMAT0027501 Homo sapiens miR-6800-3p
caccucuccuggcaucgcccc

SEQ ID NO: 2211 - RNA, 21 nt, Artificial sequence
  >hsa-miR-6800-5p MIMAT0027500 Homo sapiens miR-6800-5p
guaggugacagucaggggcgg

SEQ ID NO: 2212 - RNA, 20 nt, Artificial sequence
  >hsa-miR-6801-3p MIMAT0027503 Homo sapiens miR-6801-3p
accccugccacucacuggcc

SEQ ID NO: 2213 - RNA, 23 nt, Artificial sequence
  >hsa-miR-6801-5p MIMAT0027502 Homo sapiens miR-6801-5p
uggucagaggcagcaggaaauga

SEQ ID NO: 2214 - RNA, 22 nt, Artificial sequence
  >hsa-miR-6802-3p MIMAT0027505 Homo sapiens miR-6802-3p
uucaccccucucaccuaagcag

SEQ ID NO: 2215 - RNA, 20 nt, Artificial sequence
  >hsa-miR-6802-5p MIMAT0027504 Homo sapiens miR-6802-5p
cuagguggggggcuugaagc

SEQ ID NO: 2216 - RNA, 22 nt, Artificial sequence
  >hsa-miR-6803-3p MIMAT0027507 Homo sapiens miR-6803-3p
ucccucgccuucucacccucag

SEQ ID NO: 2217 - RNA, 22 nt, Artificial sequence
  >hsa-miR-6803-5p MIMAT0027506 Homo sapiens miR-6803-5p
cuggggguggggggcugggcgu

SEQ ID NO: 2218 - RNA, 22 nt, Artificial sequence
  >hsa-miR-6804-3p MIMAT0027509 Homo sapiens miR-6804-3p
cgcaccugccucucacccacag

SEQ ID NO: 2219 - RNA, 21 nt, Artificial sequence
  >hsa-miR-6804-5p MIMAT0027508 Homo sapiens miR-6804-5p
ugagggugucagcaggugacg

SEQ ID NO: 2220 - RNA, 23 nt, Artificial sequence
  >hsa-miR-6805-3p MIMAT0027511 Homo sapiens miR-6805-3p
uugcucugcucccccgcccccag

SEQ ID NO: 2221 - RNA, 22 nt, Artificial sequence
  >hsa-miR-6805-5p MIMAT0027510 Homo sapiens miR-6805-5p
uagggggcggcuuguggagugu

SEQ ID NO: 2222 - RNA, 22 nt, Artificial sequence
  >hsa-miR-6806-3p MIMAT0027513 Homo sapiens miR-6806-3p
ugaagcucugacauuccugcag

SEQ ID NO: 2223 - RNA, 24 nt, Artificial sequence
  >hsa-miR-6806-5p MIMAT0027512 Homo sapiens miR-6806-5p
uguaggcaugaggcagggcccagg

SEQ ID NO: 2224 - RNA, 23 nt, Artificial sequence
  >hsa-miR-6807-3p MIMAT0027515 Homo sapiens miR-6807-3p
cacugcauuccugcuuggcccag

SEQ ID NO: 2225 - RNA, 22 nt, Artificial sequence
  >hsa-miR-6807-5p MIMAT0027514 Homo sapiens miR-6807-5p
gugagccaguggaauggagagg

SEQ ID NO: 2226 - RNA, 21 nt, Artificial sequence
  >hsa-miR-6808-3p MIMAT0027517 Homo sapiens miR-6808-3p
gugugaccaccguuccugcag

SEQ ID NO: 2227 - RNA, 22 nt, Artificial sequence
  >hsa-miR-6808-5p MIMAT0027516 Homo sapiens miR-6808-5p
caggcagggaggugggaccaug

SEQ ID NO: 2228 - RNA, 21 nt, Artificial sequence
  >hsa-miR-6809-3p MIMAT0027519 Homo sapiens miR-6809-3p
cuucucuucucuccuucccag

SEQ ID NO: 2229 - RNA, 22 nt, Artificial sequence
  >hsa-miR-6809-5p MIMAT0027518 Homo sapiens miR-6809-5p
uggcaaggaaagaagaggauca

SEQ ID NO: 2230 - RNA, 23 nt, Artificial sequence
  >hsa-miR-6810-3p MIMAT0027521 Homo sapiens miR-6810-3p
uccccugcucccuuguuccccag

SEQ ID NO: 2231 - RNA, 23 nt, Artificial sequence
  >hsa-miR-6810-5p MIMAT0027520 Homo sapiens miR-6810-5p
auggggacagggaucagcauggc

SEQ ID NO: 2232 - RNA, 21 nt, Artificial sequence
  >hsa-miR-6811-3p MIMAT0027523 Homo sapiens miR-6811-3p
agccugugcuugucccugcag

SEQ ID NO: 2233 - RNA, 22 nt, Artificial sequence
  >hsa-miR-6811-5p MIMAT0027522 Homo sapiens miR-6811-5p
augcaggccuguguacagcacu

SEQ ID NO: 2234 - RNA, 21 nt, Artificial sequence
  >hsa-miR-6812-3p MIMAT0027525 Homo sapiens miR-6812-3p
ccgcucuuccccugaccccag

SEQ ID NO: 2235 - RNA, 25 nt, Artificial sequence
  >hsa-miR-6812-5p MIMAT0027524 Homo sapiens miR-6812-5p
auggggugagauggggaggagcagc

SEQ ID NO: 2236 - RNA, 21 nt, Artificial sequence
  >hsa-miR-6813-3p MIMAT0027527 Homo sapiens miR-6813-3p
aaccuuggccccucuccccag

SEQ ID NO: 2237 - RNA, 23 nt, Artificial sequence
  >hsa-miR-6813-5p MIMAT0027526 Homo sapiens miR-6813-5p
caggggcugggguuucagguucu

SEQ ID NO: 2238 - RNA, 22 nt, Artificial sequence
  >hsa-miR-6814-3p MIMAT0027529 Homo sapiens miR-6814-3p
acucgcauccuucccuuggcag

SEQ ID NO: 2239 - RNA, 22 nt, Artificial sequence
  >hsa-miR-6814-5p MIMAT0027528 Homo sapiens miR-6814-5p
ucccaagggugagaugcugcca

SEQ ID NO: 2240 - RNA, 21 nt, Artificial sequence
  >hsa-miR-6815-3p MIMAT0027531 Homo sapiens miR-6815-3p
uggcuucucuugcacacccag

SEQ ID NO: 2241 - RNA, 23 nt, Artificial sequence
  >hsa-miR-6815-5p MIMAT0027530 Homo sapiens miR-6815-5p
uagguggcgccggaggagucauu

SEQ ID NO: 2242 - RNA, 18 nt, Artificial sequence
  >hsa-miR-6816-3p MIMAT0027533 Homo sapiens miR-6816-3p
gaaggaccugcaccuucg

SEQ ID NO: 2243 - RNA, 21 nt, Artificial sequence
  >hsa-miR-6816-5p MIMAT0027532 Homo sapiens miR-6816-5p
uggggcggggcaggucccugc

SEQ ID NO: 2244 - RNA, 19 nt, Artificial sequence
  >hsa-miR-6817-3p MIMAT0027535 Homo sapiens miR-6817-3p
ucucucugacuccauggca

SEQ ID NO: 2245 - RNA, 24 nt, Artificial sequence
  >hsa-miR-6817-5p MIMAT0027534 Homo sapiens miR-6817-5p
ucugccauaggaagcuuggagugg

SEQ ID NO: 2246 - RNA, 22 nt, Artificial sequence
  >hsa-miR-6818-3p MIMAT0027537 Homo sapiens miR-6818-3p
uugucucuuguuccucacacag

SEQ ID NO: 2247 - RNA, 22 nt, Artificial sequence
  >hsa-miR-6818-5p MIMAT0027536 Homo sapiens miR-6818-5p
uugugugaguacagagagcauc

SEQ ID NO: 2248 - RNA, 21 nt, Artificial sequence
  >hsa-miR-6819-3p MIMAT0027539 Homo sapiens miR-6819-3p
aagccucuguccccaccccag

SEQ ID NO: 2249 - RNA, 22 nt, Artificial sequence
  >hsa-miR-6819-5p MIMAT0027538 Homo sapiens miR-6819-5p
uugggguggagggccaaggagc

SEQ ID NO: 2250 - RNA, 22 nt, Artificial sequence
  >hsa-miR-6820-3p MIMAT0027541 Homo sapiens miR-6820-3p
ugugacuucuccccugccacag

SEQ ID NO: 2251 - RNA, 19 nt, Artificial sequence
  >hsa-miR-6820-5p MIMAT0027540 Homo sapiens miR-6820-5p
ugcggcagagcugggguca

SEQ ID NO: 2252 - RNA, 21 nt, Artificial sequence
  >hsa-miR-6821-3p MIMAT0027543 Homo sapiens miR-6821-3p
ugaccucuccgcuccgcacag

SEQ ID NO: 2253 - RNA, 23 nt, Artificial sequence
  >hsa-miR-6821-5p MIMAT0027542 Homo sapiens miR-6821-5p
gugcgugguggcucgaggcgggg

SEQ ID NO: 2254 - RNA, 24 nt, Artificial sequence
  >hsa-miR-6822-3p MIMAT0027545 Homo sapiens miR-6822-3p
aggcucuaacuggcuuucccugca

SEQ ID NO: 2255 - RNA, 20 nt, Artificial sequence
  >hsa-miR-6822-5p MIMAT0027544 Homo sapiens miR-6822-5p
cagggaaccaguuggggcuu

SEQ ID NO: 2256 - RNA, 21 nt, Artificial sequence
  >hsa-miR-6823-3p MIMAT0027547 Homo sapiens miR-6823-3p
ugagccucuccuucccuccag

SEQ ID NO: 2257 - RNA, 21 nt, Artificial sequence
  >hsa-miR-6823-5p MIMAT0027546 Homo sapiens miR-6823-5p
ucaggguugguagggguugcu

SEQ ID NO: 2258 - RNA, 21 nt, Artificial sequence
  >hsa-miR-6824-3p MIMAT0027549 Homo sapiens miR-6824-3p
ucucuggucuugccaccccag

SEQ ID NO: 2259 - RNA, 22 nt, Artificial sequence
  >hsa-miR-6824-5p MIMAT0027548 Homo sapiens miR-6824-5p
guaggggagguugggccaggga

SEQ ID NO: 2260 - RNA, 22 nt, Artificial sequence
  >hsa-miR-6825-3p MIMAT0027551 Homo sapiens miR-6825-3p
gcgcugacccgccuucuccgca

SEQ ID NO: 2261 - RNA, 22 nt, Artificial sequence
  >hsa-miR-6825-5p MIMAT0027550 Homo sapiens miR-6825-5p
uggggagguguggagucagcau

SEQ ID NO: 2262 - RNA, 22 nt, Artificial sequence
  >hsa-miR-6826-3p MIMAT0027553 Homo sapiens miR-6826-3p
cuccccucucuuuccuguucag

SEQ ID NO: 2263 - RNA, 23 nt, Artificial sequence
  >hsa-miR-6826-5p MIMAT0027552 Homo sapiens miR-6826-5p
ucaauaggaaagaggugggaccu

SEQ ID NO: 2264 - RNA, 21 nt, Artificial sequence
  >hsa-miR-6827-3p MIMAT0027555 Homo sapiens miR-6827-3p
accgucucuucuguuccccag

SEQ ID NO: 2265 - RNA, 22 nt, Artificial sequence
  >hsa-miR-6827-5p MIMAT0027554 Homo sapiens miR-6827-5p
ugggagccaugagggucugugc

SEQ ID NO: 2266 - RNA, 20 nt, Artificial sequence
  >hsa-miR-6828-3p MIMAT0027557 Homo sapiens miR-6828-3p
aucugcucucuuguucccag

SEQ ID NO: 2267 - RNA, 22 nt, Artificial sequence
  >hsa-miR-6828-5p MIMAT0027556 Homo sapiens miR-6828-5p
aggaagcaagagaacccugugg

SEQ ID NO: 2268 - RNA, 20 nt, Artificial sequence
  >hsa-miR-6829-3p MIMAT0027559 Homo sapiens miR-6829-3p
ugccuccuccguggccucag

SEQ ID NO: 2269 - RNA, 20 nt, Artificial sequence
  >hsa-miR-6829-5p MIMAT0027558 Homo sapiens miR-6829-5p
ugggcugcugagaaggggca

SEQ ID NO: 2270 - RNA, 23 nt, Artificial sequence
  >hsa-miR-6830-3p MIMAT0027561 Homo sapiens miR-6830-3p
ugucuuucuucucucccuugcag

SEQ ID NO: 2271 - RNA, 22 nt, Artificial sequence
  >hsa-miR-6830-5p MIMAT0027560 Homo sapiens miR-6830-5p
ccaaggaaggaggcuggacauc

SEQ ID NO: 2272 - RNA, 21 nt, Artificial sequence
  >hsa-miR-6831-3p MIMAT0027563 Homo sapiens miR-6831-3p
ugacuaacucccacucuacag

SEQ ID NO: 2273 - RNA, 24 nt, Artificial sequence
  >hsa-miR-6831-5p MIMAT0027562 Homo sapiens miR-6831-5p
uagguagagugugaggaggagguc

SEQ ID NO: 2274 - RNA, 20 nt, Artificial sequence
  >hsa-miR-6832-3p MIMAT0027565 Homo sapiens miR-6832-3p
acccuuuuucucuuucccag

SEQ ID NO: 2275 - RNA, 23 nt, Artificial sequence
  >hsa-miR-6832-5p MIMAT0027564 Homo sapiens miR-6832-5p
aguagagaggaaaaguuaggguc

SEQ ID NO: 2276 - RNA, 21 nt, Artificial sequence
  >hsa-miR-6833-3p MIMAT0027567 Homo sapiens miR-6833-3p
uuucucucuccacuuccucag

SEQ ID NO: 2277 - RNA, 22 nt, Artificial sequence
  >hsa-miR-6833-5p MIMAT0027566 Homo sapiens miR-6833-5p
guguggaagaugggaggagaaa

SEQ ID NO: 2278 - RNA, 20 nt, Artificial sequence
  >hsa-miR-6834-3p MIMAT0027569 Homo sapiens miR-6834-3p
uaugucccaucccuccauca

SEQ ID NO: 2279 - RNA, 21 nt, Artificial sequence
  >hsa-miR-6834-5p MIMAT0027568 Homo sapiens miR-6834-5p
gugagggacugggauuugugg

SEQ ID NO: 2280 - RNA, 23 nt, Artificial sequence
  >hsa-miR-6835-3p MIMAT0027571 Homo sapiens miR-6835-3p
aaaagcacuuuucugucucccag

SEQ ID NO: 2281 - RNA, 22 nt, Artificial sequence
  >hsa-miR-6835-5p MIMAT0027570 Homo sapiens miR-6835-5p
aggggguagaaaguggcugaag

SEQ ID NO: 2282 - RNA, 21 nt, Artificial sequence
  >hsa-miR-6836-3p MIMAT0027575 Homo sapiens miR-6836-3p
augccucccccggccccgcag

SEQ ID NO: 2283 - RNA, 22 nt, Artificial sequence
  >hsa-miR-6836-5p MIMAT0027574 Homo sapiens miR-6836-5p
cgcagggcccuggcgcaggcau

SEQ ID NO: 2284 - RNA, 23 nt, Artificial sequence
  >hsa-miR-6837-3p MIMAT0027577 Homo sapiens miR-6837-3p
ccuucacugugacucugcugcag

SEQ ID NO: 2285 - RNA, 21 nt, Artificial sequence
  >hsa-miR-6837-5p MIMAT0027576 Homo sapiens miR-6837-5p
accagggccagcagggaaugu

SEQ ID NO: 2286 - RNA, 20 nt, Artificial sequence
  >hsa-miR-6838-3p MIMAT0027579 Homo sapiens miR-6838-3p
aaguccugcuucuguugcag

SEQ ID NO: 2287 - RNA, 22 nt, Artificial sequence
  >hsa-miR-6838-5p MIMAT0027578 Homo sapiens miR-6838-5p
aagcagcaguggcaagacuccu

SEQ ID NO: 2288 - RNA, 22 nt, Artificial sequence
  >hsa-miR-6839-3p MIMAT0027581 Homo sapiens miR-6839-3p
uuggguuuucucuucaauccag

SEQ ID NO: 2289 - RNA, 22 nt, Artificial sequence
  >hsa-miR-6839-5p MIMAT0027580 Homo sapiens miR-6839-5p
ucuggauugaagagacgaccca

SEQ ID NO: 2290 - RNA, 22 nt, Artificial sequence
  >hsa-miR-6840-3p MIMAT0027583 Homo sapiens miR-6840-3p
gcccaggacuuugugcggggug

SEQ ID NO: 2291 - RNA, 24 nt, Artificial sequence
  >hsa-miR-6840-5p MIMAT0027582 Homo sapiens miR-6840-5p
acccccgggcaaagaccugcagau

SEQ ID NO: 2292 - RNA, 21 nt, Artificial sequence
  >hsa-miR-6841-3p MIMAT0027585 Homo sapiens miR-6841-3p
accuugcaucugcauccccag

SEQ ID NO: 2293 - RNA, 22 nt, Artificial sequence
  >hsa-miR-6841-5p MIMAT0027584 Homo sapiens miR-6841-5p
uaggguacucagagcaaguugu

SEQ ID NO: 2294 - RNA, 22 nt, Artificial sequence
  >hsa-miR-6842-3p MIMAT0027587 Homo sapiens miR-6842-3p
uuggcuggucucugcuccgcag

SEQ ID NO: 2295 - RNA, 22 nt, Artificial sequence
  >hsa-miR-6842-5p MIMAT0027586 Homo sapiens miR-6842-5p
uggggguggucucuagccaagg

SEQ ID NO: 2296 - RNA, 21 nt, Artificial sequence
  >hsa-miR-6843-3p MIMAT0027588 Homo sapiens miR-6843-3p
auggucuccuguucucugcag

SEQ ID NO: 2297 - RNA, 21 nt, Artificial sequence
  >hsa-miR-6844 MIMAT0027589 Homo sapiens miR-6844
uucuuuguuuuuaauucacag

SEQ ID NO: 2298 - RNA, 21 nt, Artificial sequence
  >hsa-miR-6845-3p MIMAT0027591 Homo sapiens miR-6845-3p
ccucuccucccugugccccag

SEQ ID NO: 2299 - RNA, 19 nt, Artificial sequence
  >hsa-miR-6845-5p MIMAT0027590 Homo sapiens miR-6845-5p
cggggccagagcagagagc

SEQ ID NO: 2300 - RNA, 21 nt, Artificial sequence
  >hsa-miR-6846-3p MIMAT0027593 Homo sapiens miR-6846-3p
ugaccccuucugucucccuag

SEQ ID NO: 2301 - RNA, 22 nt, Artificial sequence
  >hsa-miR-6846-5p MIMAT0027592 Homo sapiens miR-6846-5p
ugggggcuggaugggguagagu

SEQ ID NO: 2302 - RNA, 22 nt, Artificial sequence
  >hsa-miR-6847-3p MIMAT0027595 Homo sapiens miR-6847-3p
ggcucaugugucuguccucuuc

SEQ ID NO: 2303 - RNA, 23 nt, Artificial sequence
  >hsa-miR-6847-5p MIMAT0027594 Homo sapiens miR-6847-5p
acagaggacaguggagugugagc

SEQ ID NO: 2304 - RNA, 19 nt, Artificial sequence
  >hsa-miR-6848-3p MIMAT0027597 Homo sapiens miR-6848-3p
guggucucuuggcccccag

SEQ ID NO: 2305 - RNA, 23 nt, Artificial sequence
  >hsa-miR-6848-5p MIMAT0027596 Homo sapiens miR-6848-5p
ugggggcugggaugggccauggu

SEQ ID NO: 2306 - RNA, 22 nt, Artificial sequence
  >hsa-miR-6849-3p MIMAT0027599 Homo sapiens miR-6849-3p
accagccuguguccaccuccag

SEQ ID NO: 2307 - RNA, 23 nt, Artificial sequence
  >hsa-miR-6849-5p MIMAT0027598 Homo sapiens miR-6849-5p
gaguggauaggggagugugugga

SEQ ID NO: 2308 - RNA, 20 nt, Artificial sequence
  >hsa-miR-6850-3p MIMAT0027601 Homo sapiens miR-6850-3p
cccggccggaacgccgcacu

SEQ ID NO: 2309 - RNA, 22 nt, Artificial sequence
  >hsa-miR-6850-5p MIMAT0027600 Homo sapiens miR-6850-5p
gugcggaacgcuggccggggcg

SEQ ID NO: 2310 - RNA, 21 nt, Artificial sequence
  >hsa-miR-6851-3p MIMAT0027603 Homo sapiens miR-6851-3p
uggcccuuuguaccccuccag

SEQ ID NO: 2311 - RNA, 23 nt, Artificial sequence
  >hsa-miR-6851-5p MIMAT0027602 Homo sapiens miR-6851-5p
aggaggugguacuaggggccagc

SEQ ID NO: 2312 - RNA, 17 nt, Artificial sequence
  >hsa-miR-6852-3p MIMAT0027605 Homo sapiens miR-6852-3p
uguccucuguuccucag

SEQ ID NO: 2313 - RNA, 21 nt, Artificial sequence
  >hsa-miR-6852-5p MIMAT0027604 Homo sapiens miR-6852-5p
cccugggguucugaggacaug

SEQ ID NO: 2314 - RNA, 22 nt, Artificial sequence
  >hsa-miR-6853-3p MIMAT0027607 Homo sapiens miR-6853-3p
uguucauuggaacccugcgcag

SEQ ID NO: 2315 - RNA, 24 nt, Artificial sequence
  >hsa-miR-6853-5p MIMAT0027606 Homo sapiens miR-6853-5p
agcgugggauguccaugaagucag

SEQ ID NO: 2316 - RNA, 21 nt, Artificial sequence
  >hsa-miR-6854-3p MIMAT0027609 Homo sapiens miR-6854-3p
ugcguuucuccucuugagcag

SEQ ID NO: 2317 - RNA, 24 nt, Artificial sequence
  >hsa-miR-6854-5p MIMAT0027608 Homo sapiens miR-6854-5p
aagcucagguuugagaacugcuga

SEQ ID NO: 2318 - RNA, 22 nt, Artificial sequence
  >hsa-miR-6855-3p MIMAT0027611 Homo sapiens miR-6855-3p
agacugaccuucaaccccacag

SEQ ID NO: 2319 - RNA, 25 nt, Artificial sequence
  >hsa-miR-6855-5p MIMAT0027610 Homo sapiens miR-6855-5p
uugggguuuggggugcagacauugc

SEQ ID NO: 2320 - RNA, 22 nt, Artificial sequence
  >hsa-miR-6856-3p MIMAT0027613 Homo sapiens miR-6856-3p
uacagcccugugaucuuuccag

SEQ ID NO: 2321 - RNA, 24 nt, Artificial sequence
  >hsa-miR-6856-5p MIMAT0027612 Homo sapiens miR-6856-5p
aagagaggagcaguggugcugugg

SEQ ID NO: 2322 - RNA, 21 nt, Artificial sequence
  >hsa-miR-6857-3p MIMAT0027615 Homo sapiens miR-6857-3p
ugacugagcuucuccccacag

SEQ ID NO: 2323 - RNA, 22 nt, Artificial sequence
  >hsa-miR-6857-5p MIMAT0027614 Homo sapiens miR-6857-5p
uuggggauugggucaggccagu

SEQ ID NO: 2324 - RNA, 22 nt, Artificial sequence
  >hsa-miR-6858-3p MIMAT0027617 Homo sapiens miR-6858-3p
cagccagccccugcucaccccu

SEQ ID NO: 2325 - RNA, 22 nt, Artificial sequence
  >hsa-miR-6858-5p MIMAT0027616 Homo sapiens miR-6858-5p
gugaggaggggcuggcagggac

SEQ ID NO: 2326 - RNA, 23 nt, Artificial sequence
  >hsa-miR-6859-3p MIMAT0027619 Homo sapiens miR-6859-3p
ugacccccaugucgccucuguag

SEQ ID NO: 2327 - RNA, 23 nt, Artificial sequence
  >hsa-miR-6859-5p MIMAT0027618 Homo sapiens miR-6859-5p
gagaggaacaugggcucaggaca

SEQ ID NO: 2328 - RNA, 22 nt, Artificial sequence
  >hsa-miR-6860 MIMAT0027622 Homo sapiens miR-6860
acugggcagggcuguggugagu

SEQ ID NO: 2329 - RNA, 18 nt, Artificial sequence
  >hsa-miR-6861-3p MIMAT0027624 Homo sapiens miR-6861-3p
uggaccucuccuccccag

SEQ ID NO: 2330 - RNA, 22 nt, Artificial sequence
  >hsa-miR-6861-5p MIMAT0027623 Homo sapiens miR-6861-5p
acuggguagguggggcuccagg

SEQ ID NO: 2331 - RNA, 24 nt, Artificial sequence
  >hsa-miR-6862-3p MIMAT0027626 Homo sapiens miR-6862-3p
ccucacccagcucucuggcccucu

SEQ ID NO: 2332 - RNA, 22 nt, Artificial sequence
  >hsa-miR-6862-5p MIMAT0027625 Homo sapiens miR-6862-5p
cgggcaugcugggagagacuuu

SEQ ID NO: 2333 - RNA, 23 nt, Artificial sequence
  >hsa-miR-6863 MIMAT0027627 Homo sapiens miR-6863
uagacguggugaaggauugagug

SEQ ID NO: 2334 - RNA, 21 nt, Artificial sequence
  >hsa-miR-6864-3p MIMAT0027629 Homo sapiens miR-6864-3p
gugagacuucucucccuucag

SEQ ID NO: 2335 - RNA, 24 nt, Artificial sequence
  >hsa-miR-6864-5p MIMAT0027628 Homo sapiens miR-6864-5p
uugaagggacaagucagauaugcc

SEQ ID NO: 2336 - RNA, 21 nt, Artificial sequence
  >hsa-miR-6865-3p MIMAT0027631 Homo sapiens miR-6865-3p
acacccucuuucccuaccgcc

SEQ ID NO: 2337 - RNA, 23 nt, Artificial sequence
  >hsa-miR-6865-5p MIMAT0027630 Homo sapiens miR-6865-5p
uagguggcagaggagggacuuca

SEQ ID NO: 2338 - RNA, 22 nt, Artificial sequence
  >hsa-miR-6866-3p MIMAT0027633 Homo sapiens miR-6866-3p
gaucccuuuaucuguccucuag

SEQ ID NO: 2339 - RNA, 23 nt, Artificial sequence
  >hsa-miR-6866-5p MIMAT0027632 Homo sapiens miR-6866-5p
uuagaggcuggaauagagauucu

SEQ ID NO: 2340 - RNA, 21 nt, Artificial sequence
  >hsa-miR-6867-3p MIMAT0027635 Homo sapiens miR-6867-3p
cucucccucuuuacccacuag

SEQ ID NO: 2341 - RNA, 23 nt, Artificial sequence
  >hsa-miR-6867-5p MIMAT0027634 Homo sapiens miR-6867-5p
uguguguguagaggaagaaggga

SEQ ID NO: 2342 - RNA, 21 nt, Artificial sequence
  >hsa-miR-6868-3p MIMAT0027637 Homo sapiens miR-6868-3p
uuccuucuguugucugugcag

SEQ ID NO: 2343 - RNA, 22 nt, Artificial sequence
  >hsa-miR-6868-5p MIMAT0027636 Homo sapiens miR-6868-5p
acuggcagaacacugaagcagc

SEQ ID NO: 2344 - RNA, 21 nt, Artificial sequence
  >hsa-miR-6869-3p MIMAT0027639 Homo sapiens miR-6869-3p
cgccgcgcgcaucggcucagc

SEQ ID NO: 2345 - RNA, 22 nt, Artificial sequence
  >hsa-miR-6869-5p MIMAT0027638 Homo sapiens miR-6869-5p
gugaguaguggcgcgcggcggc

SEQ ID NO: 2346 - RNA, 22 nt, Artificial sequence
  >hsa-miR-6870-3p MIMAT0027641 Homo sapiens miR-6870-3p
gcucauccccaucuccuuucag

SEQ ID NO: 2347 - RNA, 19 nt, Artificial sequence
  >hsa-miR-6870-5p MIMAT0027640 Homo sapiens miR-6870-5p
ugggggagauggggguuga

SEQ ID NO: 2348 - RNA, 22 nt, Artificial sequence
  >hsa-miR-6871-3p MIMAT0027643 Homo sapiens miR-6871-3p
cagcacccuguggcucccacag

SEQ ID NO: 2349 - RNA, 22 nt, Artificial sequence
  >hsa-miR-6871-5p MIMAT0027642 Homo sapiens miR-6871-5p
caugggaguucggggugguugc

SEQ ID NO: 2350 - RNA, 21 nt, Artificial sequence
  >hsa-miR-6872-3p MIMAT0027645 Homo sapiens miR-6872-3p
cccaugccuccugccgcgguc

SEQ ID NO: 2351 - RNA, 20 nt, Artificial sequence
  >hsa-miR-6872-5p MIMAT0027644 Homo sapiens miR-6872-5p
ucucgcaucaggaggcaagg

SEQ ID NO: 2352 - RNA, 23 nt, Artificial sequence
  >hsa-miR-6873-3p MIMAT0027647 Homo sapiens miR-6873-3p
uucucucugucuuucucucucag

SEQ ID NO: 2353 - RNA, 22 nt, Artificial sequence
  >hsa-miR-6873-5p MIMAT0027646 Homo sapiens miR-6873-5p
cagagggaauacagagggcaau

SEQ ID NO: 2354 - RNA, 23 nt, Artificial sequence
  >hsa-miR-6874-3p MIMAT0027649 Homo sapiens miR-6874-3p
caguucugcuguucugacucuag

SEQ ID NO: 2355 - RNA, 23 nt, Artificial sequence
  >hsa-miR-6874-5p MIMAT0027648 Homo sapiens miR-6874-5p
auggagcuggaaccagaucaggc

SEQ ID NO: 2356 - RNA, 22 nt, Artificial sequence
  >hsa-miR-6875-3p MIMAT0027651 Homo sapiens miR-6875-3p
auucuuccugcccuggcuccau

SEQ ID NO: 2357 - RNA, 21 nt, Artificial sequence
  >hsa-miR-6875-5p MIMAT0027650 Homo sapiens miR-6875-5p
ugagggacccaggacaggaga

SEQ ID NO: 2358 - RNA, 24 nt, Artificial sequence
  >hsa-miR-6876-3p MIMAT0027653 Homo sapiens miR-6876-3p
agcugucuguguuuuccuucucag

SEQ ID NO: 2359 - RNA, 22 nt, Artificial sequence
  >hsa-miR-6876-5p MIMAT0027652 Homo sapiens miR-6876-5p
caggaaggagacaggcaguuca

SEQ ID NO: 2360 - RNA, 21 nt, Artificial sequence
  >hsa-miR-6877-3p MIMAT0027655 Homo sapiens miR-6877-3p
cagccucugcccuuggccucc

SEQ ID NO: 2361 - RNA, 22 nt, Artificial sequence
  >hsa-miR-6877-5p MIMAT0027654 Homo sapiens miR-6877-5p
agggccgaaggguggaagcugc

SEQ ID NO: 2362 - RNA, 21 nt, Artificial sequence
  >hsa-miR-6878-3p MIMAT0027657 Homo sapiens miR-6878-3p
cuggccucuucuuucuccuag

SEQ ID NO: 2363 - RNA, 23 nt, Artificial sequence
  >hsa-miR-6878-5p MIMAT0027656 Homo sapiens miR-6878-5p
agggagaaagcuagaagcugaag

SEQ ID NO: 2364 - RNA, 21 nt, Artificial sequence
  >hsa-miR-6879-3p MIMAT0027659 Homo sapiens miR-6879-3p
ugucacccgcuccuugcccag

SEQ ID NO: 2365 - RNA, 22 nt, Artificial sequence
  >hsa-miR-6879-5p MIMAT0027658 Homo sapiens miR-6879-5p
cagggcagggaaggugggagag

SEQ ID NO: 2366 - RNA, 21 nt, Artificial sequence
  >hsa-miR-6880-3p MIMAT0027661 Homo sapiens miR-6880-3p
ccgccuucucuccucccccag

SEQ ID NO: 2367 - RNA, 22 nt, Artificial sequence
  >hsa-miR-6880-5p MIMAT0027660 Homo sapiens miR-6880-5p
ugguggaggaagagggcagcuc

SEQ ID NO: 2368 - RNA, 22 nt, Artificial sequence
  >hsa-miR-6881-3p MIMAT0027663 Homo sapiens miR-6881-3p
auccucuuucguccuucccacu

SEQ ID NO: 2369 - RNA, 22 nt, Artificial sequence
  >hsa-miR-6881-5p MIMAT0027662 Homo sapiens miR-6881-5p
ugggguaaggauaggaggguca

SEQ ID NO: 2370 - RNA, 24 nt, Artificial sequence
  >hsa-miR-6882-3p MIMAT0027665 Homo sapiens miR-6882-3p
ugcugccucuccucuugccugcag

SEQ ID NO: 2371 - RNA, 22 nt, Artificial sequence
  >hsa-miR-6882-5p MIMAT0027664 Homo sapiens miR-6882-5p
uacaagucaggagcugaagcag

SEQ ID NO: 2372 - RNA, 22 nt, Artificial sequence
  >hsa-miR-6883-3p MIMAT0027667 Homo sapiens miR-6883-3p
uucccuaucucacucuccucag

SEQ ID NO: 2373 - RNA, 22 nt, Artificial sequence
  >hsa-miR-6883-5p MIMAT0027666 Homo sapiens miR-6883-5p
agggagggugugguauggaugu

SEQ ID NO: 2374 - RNA, 23 nt, Artificial sequence
  >hsa-miR-6884-3p MIMAT0027669 Homo sapiens miR-6884-3p
cccaucaccuuuccgucuccccu

SEQ ID NO: 2375 - RNA, 22 nt, Artificial sequence
  >hsa-miR-6884-5p MIMAT0027668 Homo sapiens miR-6884-5p
agaggcugagaaggugauguug

SEQ ID NO: 2376 - RNA, 21 nt, Artificial sequence
  >hsa-miR-6885-3p MIMAT0027671 Homo sapiens miR-6885-3p
cuuugcuuccugcuccccuag

SEQ ID NO: 2377 - RNA, 25 nt, Artificial sequence
  >hsa-miR-6885-5p MIMAT0027670 Homo sapiens miR-6885-5p
aggggggcacugcgcaagcaaagcc

SEQ ID NO: 2378 - RNA, 21 nt, Artificial sequence
  >hsa-miR-6886-3p MIMAT0027673 Homo sapiens miR-6886-3p
ugcccuucucuccuccugccu

SEQ ID NO: 2379 - RNA, 21 nt, Artificial sequence
  >hsa-miR-6886-5p MIMAT0027672 Homo sapiens miR-6886-5p
cccgcaggugagaugagggcu

SEQ ID NO: 2380 - RNA, 21 nt, Artificial sequence
  >hsa-miR-6887-3p MIMAT0027675 Homo sapiens miR-6887-3p
uccccuccacuuuccuccuag

SEQ ID NO: 2381 - RNA, 23 nt, Artificial sequence
  >hsa-miR-6887-5p MIMAT0027674 Homo sapiens miR-6887-5p
uggggggacagauggagaggaca

SEQ ID NO: 2382 - RNA, 21 nt, Artificial sequence
  >hsa-miR-6888-3p MIMAT0027677 Homo sapiens miR-6888-3p
aucugucucgauuguuuccag

SEQ ID NO: 2383 - RNA, 20 nt, Artificial sequence
  >hsa-miR-6888-5p MIMAT0027676 Homo sapiens miR-6888-5p
aaggagaugcucaggcagau

SEQ ID NO: 2384 - RNA, 20 nt, Artificial sequence
  >hsa-miR-6889-3p MIMAT0027679 Homo sapiens miR-6889-3p
ucugugccccuacuucccag

SEQ ID NO: 2385 - RNA, 23 nt, Artificial sequence
  >hsa-miR-6889-5p MIMAT0027678 Homo sapiens miR-6889-5p
ucggggagucugggguccggaau

SEQ ID NO: 2386 - RNA, 20 nt, Artificial sequence
  >hsa-miR-6890-3p MIMAT0027681 Homo sapiens miR-6890-3p
ccacugccuaugccccacag

SEQ ID NO: 2387 - RNA, 21 nt, Artificial sequence
  >hsa-miR-6890-5p MIMAT0027680 Homo sapiens miR-6890-5p
caugggguagggcagaguagg

SEQ ID NO: 2388 - RNA, 21 nt, Artificial sequence
  >hsa-miR-6891-3p MIMAT0027683 Homo sapiens miR-6891-3p
cccucaucuuccccuccuuuc

SEQ ID NO: 2389 - RNA, 19 nt, Artificial sequence
  >hsa-miR-6891-5p MIMAT0027682 Homo sapiens miR-6891-5p
uaaggagggggaugagggg

SEQ ID NO: 2390 - RNA, 21 nt, Artificial sequence
  >hsa-miR-6892-3p MIMAT0027685 Homo sapiens miR-6892-3p
ucccucucccaccccuugcag

SEQ ID NO: 2391 - RNA, 21 nt, Artificial sequence
  >hsa-miR-6892-5p MIMAT0027684 Homo sapiens miR-6892-5p
guaagggaccggagaguagga

SEQ ID NO: 2392 - RNA, 22 nt, Artificial sequence
  >hsa-miR-6893-3p MIMAT0027687 Homo sapiens miR-6893-3p
cccugcugccuucaccugccag

SEQ ID NO: 2393 - RNA, 21 nt, Artificial sequence
  >hsa-miR-6893-5p MIMAT0027686 Homo sapiens miR-6893-5p
caggcagguguaggguggagc

SEQ ID NO: 2394 - RNA, 21 nt, Artificial sequence
  >hsa-miR-6894-3p MIMAT0027689 Homo sapiens miR-6894-3p
uugccugcccucuuccuccag

SEQ ID NO: 2395 - RNA, 24 nt, Artificial sequence
  >hsa-miR-6894-5p MIMAT0027688 Homo sapiens miR-6894-5p
aggaggauggagagcugggccaga

SEQ ID NO: 2396 - RNA, 22 nt, Artificial sequence
  >hsa-miR-6895-3p MIMAT0027691 Homo sapiens miR-6895-3p
ugucucucgcccuuggccuuag

SEQ ID NO: 2397 - RNA, 21 nt, Artificial sequence
  >hsa-miR-6895-5p MIMAT0027690 Homo sapiens miR-6895-5p
cagggccaggcacagaguaag

SEQ ID NO: 2398 - RNA, 22 nt, Artificial sequence
  >hsa-miR-7-1-3p MIMAT0004553 Homo sapiens miR-7-1-3p
caacaaaucacagucugccaua

SEQ ID NO: 2399 - RNA, 22 nt, Artificial sequence
  >hsa-miR-7-2-3p MIMAT0004554 Homo sapiens miR-7-2-3p
caacaaaucccagucuaccuaa

SEQ ID NO: 2400 - RNA, 23 nt, Artificial sequence
  >hsa-miR-7-5p MIMAT0000252 Homo sapiens miR-7-5p
uggaagacuagugauuuuguugu

SEQ ID NO: 2401 - RNA, 22 nt, Artificial sequence
  >hsa-miR-708-3p MIMAT0004927 Homo sapiens miR-708-3p
caacuagacugugagcuucuag

SEQ ID NO: 2402 - RNA, 23 nt, Artificial sequence
  >hsa-miR-708-5p MIMAT0004926 Homo sapiens miR-708-5p
aaggagcuuacaaucuagcuggg

SEQ ID NO: 2403 - RNA, 23 nt, Artificial sequence
  >hsa-miR-7106-3p MIMAT0028110 Homo sapiens miR-7106-3p
agcucccugaaucccugucccag

SEQ ID NO: 2404 - RNA, 20 nt, Artificial sequence
  >hsa-miR-7106-5p MIMAT0028109 Homo sapiens miR-7106-5p
ugggaggaggggaucuuggg

SEQ ID NO: 2405 - RNA, 27 nt, Artificial sequence
  >hsa-miR-7107-3p MIMAT0028112 Homo sapiens miR-7107-3p
uggucuguucauucucucuuuuuggcc

SEQ ID NO: 2406 - RNA, 22 nt, Artificial sequence
  >hsa-miR-7107-5p MIMAT0028111 Homo sapiens miR-7107-5p
ucggccuggggaggaggaaggg

SEQ ID NO: 2407 - RNA, 20 nt, Artificial sequence
  >hsa-miR-7108-3p MIMAT0028114 Homo sapiens miR-7108-3p
acccgcccgucuccccacag

SEQ ID NO: 2408 - RNA, 21 nt, Artificial sequence
  >hsa-miR-7108-5p MIMAT0028113 Homo sapiens miR-7108-5p
guguggccggcaggcgggugg

SEQ ID NO: 2409 - RNA, 22 nt, Artificial sequence
  >hsa-miR-7109-3p MIMAT0028116 Homo sapiens miR-7109-3p
caagccucuccugcccuuccag

SEQ ID NO: 2410 - RNA, 21 nt, Artificial sequence
  >hsa-miR-7109-5p MIMAT0028115 Homo sapiens miR-7109-5p
cuggggggaggagacccugcu

SEQ ID NO: 2411 - RNA, 22 nt, Artificial sequence
  >hsa-miR-711 MIMAT0012734 Homo sapiens miR-711
gggacccagggagagacguaag

SEQ ID NO: 2412 - RNA, 22 nt, Artificial sequence
  >hsa-miR-7110-3p MIMAT0028118 Homo sapiens miR-7110-3p
ucucucucccacuucccugcag

SEQ ID NO: 2413 - RNA, 21 nt, Artificial sequence
  >hsa-miR-7110-5p MIMAT0028117 Homo sapiens miR-7110-5p
uggggguguggggagagagag

SEQ ID NO: 2414 - RNA, 22 nt, Artificial sequence
  >hsa-miR-7111-3p MIMAT0028120 Homo sapiens miR-7111-3p
auccucucuucccuccucccag

SEQ ID NO: 2415 - RNA, 22 nt, Artificial sequence
  >hsa-miR-7111-5p MIMAT0028119 Homo sapiens miR-7111-5p
ugggggaggaaggacaggccau

SEQ ID NO: 2416 - RNA, 23 nt, Artificial sequence
  >hsa-miR-7112-3p MIMAT0028122 Homo sapiens miR-7112-3p
ugcaucacagccuuuggcccuag

SEQ ID NO: 2417 - RNA, 22 nt, Artificial sequence
  >hsa-miR-7112-5p MIMAT0028121 Homo sapiens miR-7112-5p
acgggcagggcagugcacccug

SEQ ID NO: 2418 - RNA, 23 nt, Artificial sequence
  >hsa-miR-7113-3p MIMAT0028124 Homo sapiens miR-7113-3p
ccucccugcccgccucucugcag

SEQ ID NO: 2419 - RNA, 21 nt, Artificial sequence
  >hsa-miR-7113-5p MIMAT0028123 Homo sapiens miR-7113-5p
uccagggagacagugugugag

SEQ ID NO: 2420 - RNA, 21 nt, Artificial sequence
  >hsa-miR-7114-3p MIMAT0028126 Homo sapiens miR-7114-3p
ugacccaccccucuccaccag

SEQ ID NO: 2421 - RNA, 21 nt, Artificial sequence
  >hsa-miR-7114-5p MIMAT0028125 Homo sapiens miR-7114-5p
ucuguggaguggggugccugu

SEQ ID NO: 2422 - RNA, 18 nt, Artificial sequence
  >hsa-miR-7150 MIMAT0028211 Homo sapiens miR-7150
cuggcagggggagaggua

SEQ ID NO: 2423 - RNA, 21 nt, Artificial sequence
  >hsa-miR-7151-3p MIMAT0028213 Homo sapiens miR-7151-3p
cuacaggcuggaaugggcuca

SEQ ID NO: 2424 - RNA, 23 nt, Artificial sequence
  >hsa-miR-7151-5p MIMAT0028212 Homo sapiens miR-7151-5p
gauccaucucugccuguauuggc

SEQ ID NO: 2425 - RNA, 20 nt, Artificial sequence
  >hsa-miR-7152-3p MIMAT0028215 Homo sapiens miR-7152-3p
ucugguccuggacaggaggc

SEQ ID NO: 2426 - RNA, 22 nt, Artificial sequence
  >hsa-miR-7152-5p MIMAT0028214 Homo sapiens miR-7152-5p
uuuccuguccuccaaccagacc

SEQ ID NO: 2427 - RNA, 18 nt, Artificial sequence
  >hsa-miR-7153-3p MIMAT0028217 Homo sapiens miR-7153-3p
caccauggacgguuuacc

SEQ ID NO: 2428 - RNA, 23 nt, Artificial sequence
  >hsa-miR-7153-5p MIMAT0028216 Homo sapiens miR-7153-5p
ugagaacugacaaaugugguagg

SEQ ID NO: 2429 - RNA, 20 nt, Artificial sequence
  >hsa-miR-7154-3p MIMAT0028219 Homo sapiens miR-7154-3p
aggaggacaaguugugggau

SEQ ID NO: 2430 - RNA, 23 nt, Artificial sequence
  >hsa-miR-7154-5p MIMAT0028218 Homo sapiens miR-7154-5p
uucaugaacugggucuagcuugg

SEQ ID NO: 2431 - RNA, 19 nt, Artificial sequence
  >hsa-miR-7155-3p MIMAT0028221 Homo sapiens miR-7155-3p
uggcccaagaccucagacc

SEQ ID NO: 2432 - RNA, 19 nt, Artificial sequence
  >hsa-miR-7155-5p MIMAT0028220 Homo sapiens miR-7155-5p
ucuggggucuugggccauc

SEQ ID NO: 2433 - RNA, 23 nt, Artificial sequence
  >hsa-miR-7156-3p MIMAT0028223 Homo sapiens miR-7156-3p
cugcagccacuuggggaacuggu

SEQ ID NO: 2434 - RNA, 23 nt, Artificial sequence
  >hsa-miR-7156-5p MIMAT0028222 Homo sapiens miR-7156-5p
uuguucucaaacuggcugucaga

SEQ ID NO: 2435 - RNA, 22 nt, Artificial sequence
  >hsa-miR-7157-3p MIMAT0028225 Homo sapiens miR-7157-3p
ucugugcuacuggaugaagagu

SEQ ID NO: 2436 - RNA, 23 nt, Artificial sequence
  >hsa-miR-7157-5p MIMAT0028224 Homo sapiens miR-7157-5p
ucagcauucauuggcaccagaga

SEQ ID NO: 2437 - RNA, 21 nt, Artificial sequence
  >hsa-miR-7158-3p MIMAT0028227 Homo sapiens miR-7158-3p
cugaacuagagauugggccca

SEQ ID NO: 2438 - RNA, 24 nt, Artificial sequence
  >hsa-miR-7158-5p MIMAT0028226 Homo sapiens miR-7158-5p
ggcucaaucucugguccugcagcc

SEQ ID NO: 2439 - RNA, 19 nt, Artificial sequence
  >hsa-miR-7159-3p MIMAT0028229 Homo sapiens miR-7159-3p
uuucuauguuaguuggaag

SEQ ID NO: 2440 - RNA, 21 nt, Artificial sequence
  >hsa-miR-7159-5p MIMAT0028228 Homo sapiens miR-7159-5p
uucaacaaggguguaggaugg

SEQ ID NO: 2441 - RNA, 21 nt, Artificial sequence
  >hsa-miR-7160-3p MIMAT0028231 Homo sapiens miR-7160-3p
cagggcccuggcuuuagcaga

SEQ ID NO: 2442 - RNA, 21 nt, Artificial sequence
  >hsa-miR-7160-5p MIMAT0028230 Homo sapiens miR-7160-5p
ugcugagguccgggcugugcc

SEQ ID NO: 2443 - RNA, 28 nt, Artificial sequence
  >hsa-miR-7161-3p MIMAT0028233 Homo sapiens miR-7161-3p
uagaucuuugacucuggcagucuccagg

SEQ ID NO: 2444 - RNA, 23 nt, Artificial sequence
  >hsa-miR-7161-5p MIMAT0028232 Homo sapiens miR-7161-5p
uaaagacuguagaggcaacuggu

SEQ ID NO: 2445 - RNA, 19 nt, Artificial sequence
  >hsa-miR-7162-3p MIMAT0028235 Homo sapiens miR-7162-3p
ucugagguggaacagcagc

SEQ ID NO: 2446 - RNA, 18 nt, Artificial sequence
  >hsa-miR-7162-5p MIMAT0028234 Homo sapiens miR-7162-5p
ugcuuccuuucucagcug

SEQ ID NO: 2447 - RNA, 21 nt, Artificial sequence
  >hsa-miR-718 MIMAT0012735 Homo sapiens miR-718
cuuccgccccgccgggcgucg

SEQ ID NO: 2448 - RNA, 22 nt, Artificial sequence
  >hsa-miR-744-3p MIMAT0004946 Homo sapiens miR-744-3p
cuguugccacuaaccucaaccu

SEQ ID NO: 2449 - RNA, 22 nt, Artificial sequence
  >hsa-miR-744-5p MIMAT0004945 Homo sapiens miR-744-5p
ugcggggcuagggcuaacagca

SEQ ID NO: 2450 - RNA, 18 nt, Artificial sequence
  >hsa-miR-7515 MIMAT0029310 Homo sapiens miR-7515
agaagggaagauggugac

SEQ ID NO: 2451 - RNA, 22 nt, Artificial sequence
  >hsa-miR-758-3p MIMAT0003879 Homo sapiens miR-758-3p
uuugugaccugguccacuaacc

SEQ ID NO: 2452 - RNA, 22 nt, Artificial sequence
  >hsa-miR-758-5p MIMAT0022929 Homo sapiens miR-758-5p
gaugguugaccagagagcacac

SEQ ID NO: 2453 - RNA, 22 nt, Artificial sequence
  >hsa-miR-759 MIMAT0010497 Homo sapiens miR-759
gcagagugcaaacaauuuugac

SEQ ID NO: 2454 - RNA, 20 nt, Artificial sequence
  >hsa-miR-760 MIMAT0004957 Homo sapiens miR-760
cggcucugggucugugggga

SEQ ID NO: 2455 - RNA, 22 nt, Artificial sequence
  >hsa-miR-761 MIMAT0010364 Homo sapiens miR-761
gcagcagggugaaacugacaca

SEQ ID NO: 2456 - RNA, 22 nt, Artificial sequence
  >hsa-miR-762 MIMAT0010313 Homo sapiens miR-762
ggggcuggggccggggccgagc

SEQ ID NO: 2457 - RNA, 22 nt, Artificial sequence
  >hsa-miR-764 MIMAT0010367 Homo sapiens miR-764
gcaggugcucacuuguccuccu

SEQ ID NO: 2458 - RNA, 19 nt, Artificial sequence
  >hsa-miR-7641 MIMAT0029782 Homo sapiens miR-7641
uugaucucggaagcuaagc

SEQ ID NO: 2459 - RNA, 21 nt, Artificial sequence
  >hsa-miR-765 MIMAT0003945 Homo sapiens miR-765
uggaggagaaggaaggugaug

SEQ ID NO: 2460 - RNA, 22 nt, Artificial sequence
  >hsa-miR-766-3p MIMAT0003888 Homo sapiens miR-766-3p
acuccagccccacagccucagc

SEQ ID NO: 2461 - RNA, 22 nt, Artificial sequence
  >hsa-miR-766-5p MIMAT0022714 Homo sapiens miR-766-5p
aggaggaauuggugcuggucuu

SEQ ID NO: 2462 - RNA, 23 nt, Artificial sequence
  >hsa-miR-767-3p MIMAT0003883 Homo sapiens miR-767-3p
ucugcucauaccccaugguuucu

SEQ ID NO: 2463 - RNA, 23 nt, Artificial sequence
  >hsa-miR-767-5p MIMAT0003882 Homo sapiens miR-767-5p
ugcaccaugguugucugagcaug

SEQ ID NO: 2464 - RNA, 23 nt, Artificial sequence
  >hsa-miR-769-3p MIMAT0003887 Homo sapiens miR-769-3p
cugggaucuccggggucuugguu

SEQ ID NO: 2465 - RNA, 22 nt, Artificial sequence
  >hsa-miR-769-5p MIMAT0003886 Homo sapiens miR-769-5p
ugagaccucuggguucugagcu

SEQ ID NO: 2466 - RNA, 23 nt, Artificial sequence
  >hsa-miR-770-5p MIMAT0003948 Homo sapiens miR-770-5p
uccaguaccacgugucagggcca

SEQ ID NO: 2467 - RNA, 22 nt, Artificial sequence
  >hsa-miR-7702 MIMAT0030017 Homo sapiens miR-7702
cuuagacugccagacucccuga

SEQ ID NO: 2468 - RNA, 23 nt, Artificial sequence
  >hsa-miR-7703 MIMAT0030018 Homo sapiens miR-7703
uugcacucuggccuucucccagg

SEQ ID NO: 2469 - RNA, 19 nt, Artificial sequence
  >hsa-miR-7704 MIMAT0030019 Homo sapiens miR-7704
cggggucggcggcgacgug

SEQ ID NO: 2470 - RNA, 23 nt, Artificial sequence
  >hsa-miR-7705 MIMAT0030020 Homo sapiens miR-7705
aauagcucagaaugucaguucug

SEQ ID NO: 2471 - RNA, 24 nt, Artificial sequence
  >hsa-miR-7706 MIMAT0030021 Homo sapiens miR-7706
ugaagcgccugugcucugccgaga

SEQ ID NO: 2472 - RNA, 22 nt, Artificial sequence
  >hsa-miR-7843-3p MIMAT0030412 Homo sapiens miR-7843-3p
augaagccuucucugccuuacg

SEQ ID NO: 2473 - RNA, 22 nt, Artificial sequence
  >hsa-miR-7843-5p MIMAT0030411 Homo sapiens miR-7843-5p
gagggcagagccagcuuccuga

SEQ ID NO: 2474 - RNA, 22 nt, Artificial sequence
  >hsa-miR-7844-5p MIMAT0030419 Homo sapiens miR-7844-5p
aaaacuaggacuguguggugua

SEQ ID NO: 2475 - RNA, 21 nt, Artificial sequence
  >hsa-miR-7845-5p MIMAT0030420 Homo sapiens miR-7845-5p
aagggacagggagggucgugg

SEQ ID NO: 2476 - RNA, 21 nt, Artificial sequence
  >hsa-miR-7846-3p MIMAT0030421 Homo sapiens miR-7846-3p
cagcggagccuggagagaagg

SEQ ID NO: 2477 - RNA, 21 nt, Artificial sequence
  >hsa-miR-7847-3p MIMAT0030422 Homo sapiens miR-7847-3p
cguggaggacgaggaggaggc

SEQ ID NO: 2478 - RNA, 23 nt, Artificial sequence
  >hsa-miR-7848-3p MIMAT0030423 Homo sapiens miR-7848-3p
cuacccucggucugcuuaccaca

SEQ ID NO: 2479 - RNA, 22 nt, Artificial sequence
  >hsa-miR-7849-3p MIMAT0030424 Homo sapiens miR-7849-3p
gacaauuguugaucuugggccu

SEQ ID NO: 2480 - RNA, 21 nt, Artificial sequence
  >hsa-miR-7850-5p MIMAT0030425 Homo sapiens miR-7850-5p
guuuggacauaguguggcugg

SEQ ID NO: 2481 - RNA, 22 nt, Artificial sequence
  >hsa-miR-7851-3p MIMAT0030426 Homo sapiens miR-7851-3p
uaccugggagacugagguugga

SEQ ID NO: 2482 - RNA, 22 nt, Artificial sequence
  >hsa-miR-7852-3p MIMAT0030427 Homo sapiens miR-7852-3p
uauguaguagucaaaggcauuu

SEQ ID NO: 2483 - RNA, 21 nt, Artificial sequence
  >hsa-miR-7853-5p MIMAT0030428 Homo sapiens miR-7853-5p
ucaaaugcagauccugacuuc

SEQ ID NO: 2484 - RNA, 21 nt, Artificial sequence
  >hsa-miR-7854-3p MIMAT0030429 Homo sapiens miR-7854-3p
ugaggugaccgcagaugggaa

SEQ ID NO: 2485 - RNA, 22 nt, Artificial sequence
  >hsa-miR-7855-5p MIMAT0030430 Homo sapiens miR-7855-5p
uuggugaggaccccaagcucgg

SEQ ID NO: 2486 - RNA, 21 nt, Artificial sequence
  >hsa-miR-7856-5p MIMAT0030431 Homo sapiens miR-7856-5p
uuuuaaggacacugagggauc

SEQ ID NO: 2487 - RNA, 20 nt, Artificial sequence
  >hsa-miR-7973 MIMAT0031176 Homo sapiens miR-7973
ugugacccuagaauaauuac

SEQ ID NO: 2488 - RNA, 24 nt, Artificial sequence
  >hsa-miR-7974 MIMAT0031177 Homo sapiens miR-7974
aggcugugaugcucuccugagccc

SEQ ID NO: 2489 - RNA, 18 nt, Artificial sequence
  >hsa-miR-7975 MIMAT0031178 Homo sapiens miR-7975
auccuagucacggcacca

SEQ ID NO: 2490 - RNA, 19 nt, Artificial sequence
  >hsa-miR-7976 MIMAT0031179 Homo sapiens miR-7976
ugcccugagacuuuugcuc

SEQ ID NO: 2491 - RNA, 18 nt, Artificial sequence
  >hsa-miR-7977 MIMAT0031180 Homo sapiens miR-7977
uucccagccaacgcacca

SEQ ID NO: 2492 - RNA, 21 nt, Artificial sequence
  >hsa-miR-7978 MIMAT0031181 Homo sapiens miR-7978
ucugguguauagcguugcuca

SEQ ID NO: 2493 - RNA, 23 nt, Artificial sequence
  >hsa-miR-802 MIMAT0004185 Homo sapiens miR-802
caguaacaaagauucauccuugu

SEQ ID NO: 2494 - RNA, 22 nt, Artificial sequence
  >hsa-miR-8052 MIMAT0030979 Homo sapiens miR-8052
cgggacuguagagggcaugagc

SEQ ID NO: 2495 - RNA, 24 nt, Artificial sequence
  >hsa-miR-8053 MIMAT0030980 Homo sapiens miR-8053
uggcgauuuuggaacucaauggca

SEQ ID NO: 2496 - RNA, 21 nt, Artificial sequence
  >hsa-miR-8054 MIMAT0030981 Homo sapiens miR-8054
gaaaguacagaucggaugggu

SEQ ID NO: 2497 - RNA, 23 nt, Artificial sequence
  >hsa-miR-8055 MIMAT0030982 Homo sapiens miR-8055
cuuugagcacaugagcagacgga

SEQ ID NO: 2498 - RNA, 20 nt, Artificial sequence
  >hsa-miR-8056 MIMAT0030983 Homo sapiens miR-8056
cguggauugucuggaugcau

SEQ ID NO: 2499 - RNA, 21 nt, Artificial sequence
  >hsa-miR-8057 MIMAT0030984 Homo sapiens miR-8057
guggcucuguaguaagaugga

SEQ ID NO: 2500 - RNA, 22 nt, Artificial sequence
  >hsa-miR-8058 MIMAT0030985 Homo sapiens miR-8058
cuggacuuugaucuugccauaa

SEQ ID NO: 2501 - RNA, 22 nt, Artificial sequence
  >hsa-miR-8059 MIMAT0030986 Homo sapiens miR-8059
ggggaacuguagaugaaaaggc

SEQ ID NO: 2502 - RNA, 24 nt, Artificial sequence
  >hsa-miR-8060 MIMAT0030987 Homo sapiens miR-8060
ccaugaagcaguggguaggaggac

SEQ ID NO: 2503 - RNA, 21 nt, Artificial sequence
  >hsa-miR-8061 MIMAT0030988 Homo sapiens miR-8061
cuuagauuagaggauauuguu

SEQ ID NO: 2504 - RNA, 21 nt, Artificial sequence
  >hsa-miR-8062 MIMAT0030989 Homo sapiens miR-8062
cagugauuugaggauuauugc

SEQ ID NO: 2505 - RNA, 22 nt, Artificial sequence
  >hsa-miR-8063 MIMAT0030990 Homo sapiens miR-8063
ucaaaaucaggagucggggcuu

SEQ ID NO: 2506 - RNA, 20 nt, Artificial sequence
  >hsa-miR-8064 MIMAT0030991 Homo sapiens miR-8064
agcacacugagcgagcggac

SEQ ID NO: 2507 - RNA, 24 nt, Artificial sequence
  >hsa-miR-8065 MIMAT0030992 Homo sapiens miR-8065
uguaggaacaguugaauuuuggcu

SEQ ID NO: 2508 - RNA, 21 nt, Artificial sequence
  >hsa-miR-8066 MIMAT0030993 Homo sapiens miR-8066
caaugugaucuuuuggaugua

SEQ ID NO: 2509 - RNA, 22 nt, Artificial sequence
  >hsa-miR-8067 MIMAT0030994 Homo sapiens miR-8067
ccuagaaacuguaaacuuaguc

SEQ ID NO: 2510 - RNA, 22 nt, Artificial sequence
  >hsa-miR-8068 MIMAT0030995 Homo sapiens miR-8068
uguuuguuguaaggaucguugu

SEQ ID NO: 2511 - RNA, 23 nt, Artificial sequence
  >hsa-miR-8069 MIMAT0030996 Homo sapiens miR-8069
ggaugguugggggcggucggcgu

SEQ ID NO: 2512 - RNA, 22 nt, Artificial sequence
  >hsa-miR-8070 MIMAT0030997 Homo sapiens miR-8070
augugauugacggcugacucca

SEQ ID NO: 2513 - RNA, 20 nt, Artificial sequence
  >hsa-miR-8071 MIMAT0030998 Homo sapiens miR-8071
cgguggacuggagugggugg

SEQ ID NO: 2514 - RNA, 20 nt, Artificial sequence
  >hsa-miR-8072 MIMAT0030999 Homo sapiens miR-8072
ggcggcggggagguaggcag

SEQ ID NO: 2515 - RNA, 22 nt, Artificial sequence
  >hsa-miR-8073 MIMAT0031000 Homo sapiens miR-8073
accuggcagcagggagcgucgu

SEQ ID NO: 2516 - RNA, 24 nt, Artificial sequence
  >hsa-miR-8074 MIMAT0031001 Homo sapiens miR-8074
cuauggcgagacuggcauguacuc

SEQ ID NO: 2517 - RNA, 24 nt, Artificial sequence
  >hsa-miR-8075 MIMAT0031002 Homo sapiens miR-8075
ugcugauggcagaugucgggucug

SEQ ID NO: 2518 - RNA, 24 nt, Artificial sequence
  >hsa-miR-8076 MIMAT0031003 Homo sapiens miR-8076
uauauggacuuuucugauacaaug

SEQ ID NO: 2519 - RNA, 22 nt, Artificial sequence
  >hsa-miR-8077 MIMAT0031004 Homo sapiens miR-8077
ggcugagugggguucugacucc

SEQ ID NO: 2520 - RNA, 23 nt, Artificial sequence
  >hsa-miR-8078 MIMAT0031005 Homo sapiens miR-8078
ggucuaggcccggugagagacuc

SEQ ID NO: 2521 - RNA, 20 nt, Artificial sequence
  >hsa-miR-8079 MIMAT0031006 Homo sapiens miR-8079
cagugaucgucucugcuggc

SEQ ID NO: 2522 - RNA, 23 nt, Artificial sequence
  >hsa-miR-8080 MIMAT0031007 Homo sapiens miR-8080
gaaggacacuggugucaacggcu

SEQ ID NO: 2523 - RNA, 23 nt, Artificial sequence
  >hsa-miR-8081 MIMAT0031008 Homo sapiens miR-8081
cuugagucgugccuuucugaaug

SEQ ID NO: 2524 - RNA, 22 nt, Artificial sequence
  >hsa-miR-8082 MIMAT0031009 Homo sapiens miR-8082
ugauggagcugggaauacucug

SEQ ID NO: 2525 - RNA, 21 nt, Artificial sequence
  >hsa-miR-8083 MIMAT0031010 Homo sapiens miR-8083
caggacuugacggcugcaacu

SEQ ID NO: 2526 - RNA, 23 nt, Artificial sequence
  >hsa-miR-8084 MIMAT0031011 Homo sapiens miR-8084
gaauacuaaguaaaaaaucagua

SEQ ID NO: 2527 - RNA, 21 nt, Artificial sequence
  >hsa-miR-8085 MIMAT0031012 Homo sapiens miR-8085
ugggagagaggacugugaggc

SEQ ID NO: 2528 - RNA, 22 nt, Artificial sequence
  >hsa-miR-8086 MIMAT0031013 Homo sapiens miR-8086
ugcuagucuggacugauauggu

SEQ ID NO: 2529 - RNA, 23 nt, Artificial sequence
  >hsa-miR-8087 MIMAT0031014 Homo sapiens miR-8087
gaagacuucuuggauuacagggg

SEQ ID NO: 2530 - RNA, 21 nt, Artificial sequence
  >hsa-miR-8088 MIMAT0031015 Homo sapiens miR-8088
ccucgguacuggaaaggggua

SEQ ID NO: 2531 - RNA, 24 nt, Artificial sequence
  >hsa-miR-8089 MIMAT0031016 Homo sapiens miR-8089
ccuggggacaggggauuggggcag

SEQ ID NO: 2532 - RNA, 21 nt, Artificial sequence
  >hsa-miR-8485 MIMAT0033692 Homo sapiens miR-8485
cacacacacacacacacguau

SEQ ID NO: 2533 - RNA, 22 nt, Artificial sequence
  >hsa-miR-873-3p MIMAT0022717 Homo sapiens miR-873-3p
ggagacugaugaguucccggga

SEQ ID NO: 2534 - RNA, 21 nt, Artificial sequence
  >hsa-miR-873-5p MIMAT0004953 Homo sapiens miR-873-5p
gcaggaacuugugagucuccu

SEQ ID NO: 2535 - RNA, 22 nt, Artificial sequence
  >hsa-miR-874-3p MIMAT0004911 Homo sapiens miR-874-3p
cugcccuggcccgagggaccga

SEQ ID NO: 2536 - RNA, 23 nt, Artificial sequence
  >hsa-miR-874-5p MIMAT0026718 Homo sapiens miR-874-5p
cggccccacgcaccaggguaaga

SEQ ID NO: 2537 - RNA, 21 nt, Artificial sequence
  >hsa-miR-875-3p MIMAT0004923 Homo sapiens miR-875-3p
ccuggaaacacugagguugug

SEQ ID NO: 2538 - RNA, 22 nt, Artificial sequence
  >hsa-miR-875-5p MIMAT0004922 Homo sapiens miR-875-5p
uauaccucaguuuuaucaggug

SEQ ID NO: 2539 - RNA, 22 nt, Artificial sequence
  >hsa-miR-876-3p MIMAT0004925 Homo sapiens miR-876-3p
uggugguuuacaaaguaauuca

SEQ ID NO: 2540 - RNA, 22 nt, Artificial sequence
  >hsa-miR-876-5p MIMAT0004924 Homo sapiens miR-876-5p
uggauuucuuugugaaucacca

SEQ ID NO: 2541 - RNA, 21 nt, Artificial sequence
  >hsa-miR-877-3p MIMAT0004950 Homo sapiens miR-877-3p
uccucuucucccuccucccag

SEQ ID NO: 2542 - RNA, 20 nt, Artificial sequence
  >hsa-miR-877-5p MIMAT0004949 Homo sapiens miR-877-5p
guagaggagauggcgcaggg

SEQ ID NO: 2543 - RNA, 22 nt, Artificial sequence
  >hsa-miR-885-3p MIMAT0004948 Homo sapiens miR-885-3p
aggcagcgggguguaguggaua

SEQ ID NO: 2544 - RNA, 22 nt, Artificial sequence
  >hsa-miR-885-5p MIMAT0004947 Homo sapiens miR-885-5p
uccauuacacuacccugccucu

SEQ ID NO: 2545 - RNA, 22 nt, Artificial sequence
  >hsa-miR-887-3p MIMAT0004951 Homo sapiens miR-887-3p
gugaacgggcgccaucccgagg

SEQ ID NO: 2546 - RNA, 21 nt, Artificial sequence
  >hsa-miR-887-5p MIMAT0026720 Homo sapiens miR-887-5p
cuugggagcccuguuagacuc

SEQ ID NO: 2547 - RNA, 22 nt, Artificial sequence
  >hsa-miR-888-3p MIMAT0004917 Homo sapiens miR-888-3p
gacugacaccucuuugggugaa

SEQ ID NO: 2548 - RNA, 21 nt, Artificial sequence
  >hsa-miR-888-5p MIMAT0004916 Homo sapiens miR-888-5p
uacucaaaaagcugucaguca

SEQ ID NO: 2549 - RNA, 21 nt, Artificial sequence
  >hsa-miR-889-3p MIMAT0004921 Homo sapiens miR-889-3p
uuaauaucggacaaccauugu

SEQ ID NO: 2550 - RNA, 22 nt, Artificial sequence
  >hsa-miR-889-5p MIMAT0026719 Homo sapiens miR-889-5p
aauggcuguccguaguaugguc

SEQ ID NO: 2551 - RNA, 21 nt, Artificial sequence
  >hsa-miR-890 MIMAT0004912 Homo sapiens miR-890
uacuuggaaaggcaucaguug

SEQ ID NO: 2552 - RNA, 22 nt, Artificial sequence
  >hsa-miR-891a-3p MIMAT0026717 Homo sapiens miR-891a-3p
aguggcacauguuuguugugag

SEQ ID NO: 2553 - RNA, 22 nt, Artificial sequence
  >hsa-miR-891a-5p MIMAT0004902 Homo sapiens miR-891a-5p
ugcaacgaaccugagccacuga

SEQ ID NO: 2554 - RNA, 22 nt, Artificial sequence
  >hsa-miR-891b MIMAT0004913 Homo sapiens miR-891b
ugcaacuuaccugagucauuga

SEQ ID NO: 2555 - RNA, 21 nt, Artificial sequence
  >hsa-miR-892a MIMAT0004907 Homo sapiens miR-892a
cacuguguccuuucugcguag

SEQ ID NO: 2556 - RNA, 22 nt, Artificial sequence
  >hsa-miR-892b MIMAT0004918 Homo sapiens miR-892b
cacuggcuccuuucuggguaga

SEQ ID NO: 2557 - RNA, 22 nt, Artificial sequence
  >hsa-miR-892c-3p MIMAT0025858 Homo sapiens miR-892c-3p
cacuguuuccuuucugagugga

SEQ ID NO: 2558 - RNA, 21 nt, Artificial sequence
  >hsa-miR-892c-5p MIMAT0025857 Homo sapiens miR-892c-5p
uauucagaaaggugccaguca

SEQ ID NO: 2559 - RNA, 22 nt, Artificial sequence
  >hsa-miR-9-3p MIMAT0000442 Homo sapiens miR-9-3p
auaaagcuagauaaccgaaagu

SEQ ID NO: 2560 - RNA, 23 nt, Artificial sequence
  >hsa-miR-9-5p MIMAT0000441 Homo sapiens miR-9-5p
ucuuugguuaucuagcuguauga

SEQ ID NO: 2561 - RNA, 20 nt, Artificial sequence
  >hsa-miR-920 MIMAT0004970 Homo sapiens miR-920
ggggagcuguggaagcagua

SEQ ID NO: 2562 - RNA, 25 nt, Artificial sequence
  >hsa-miR-921 MIMAT0004971 Homo sapiens miR-921
cuagugagggacagaaccaggauuc

SEQ ID NO: 2563 - RNA, 23 nt, Artificial sequence
  >hsa-miR-922 MIMAT0004972 Homo sapiens miR-922
gcagcagagaauaggacuacguc

SEQ ID NO: 2564 - RNA, 20 nt, Artificial sequence
  >hsa-miR-924 MIMAT0004974 Homo sapiens miR-924
agagucuugugaugucuugc

SEQ ID NO: 2565 - RNA, 23 nt, Artificial sequence
  >hsa-miR-92a-1-5p MIMAT0004507 Homo sapiens miR-92a-1-5p
agguugggaucgguugcaaugcu

SEQ ID NO: 2566 - RNA, 22 nt, Artificial sequence
  >hsa-miR-92a-2-5p MIMAT0004508 Homo sapiens miR-92a-2-5p
ggguggggauuuguugcauuac

SEQ ID NO: 2567 - RNA, 22 nt, Artificial sequence
  >hsa-miR-92a-3p MIMAT0000092 Homo sapiens miR-92a-3p
uauugcacuugucccggccugu

SEQ ID NO: 2568 - RNA, 22 nt, Artificial sequence
  >hsa-miR-92b-3p MIMAT0003218 Homo sapiens miR-92b-3p
uauugcacucgucccggccucc

SEQ ID NO: 2569 - RNA, 22 nt, Artificial sequence
  >hsa-miR-92b-5p MIMAT0004792 Homo sapiens miR-92b-5p
agggacgggacgcggugcagug

SEQ ID NO: 2570 - RNA, 22 nt, Artificial sequence
  >hsa-miR-93-3p MIMAT0004509 Homo sapiens miR-93-3p
acugcugagcuagcacuucccg

SEQ ID NO: 2571 - RNA, 23 nt, Artificial sequence
  >hsa-miR-93-5p MIMAT0000093 Homo sapiens miR-93-5p
caaagugcuguucgugcagguag

SEQ ID NO: 2572 - RNA, 22 nt, Artificial sequence
  >hsa-miR-933 MIMAT0004976 Homo sapiens miR-933
ugugcgcagggagaccucuccc

SEQ ID NO: 2573 - RNA, 22 nt, Artificial sequence
  >hsa-miR-934 MIMAT0004977 Homo sapiens miR-934
ugucuacuacuggagacacugg

SEQ ID NO: 2574 - RNA, 23 nt, Artificial sequence
  >hsa-miR-935 MIMAT0004978 Homo sapiens miR-935
ccaguuaccgcuuccgcuaccgc

SEQ ID NO: 2575 - RNA, 22 nt, Artificial sequence
  >hsa-miR-936 MIMAT0004979 Homo sapiens miR-936
acaguagagggaggaaucgcag

SEQ ID NO: 2576 - RNA, 22 nt, Artificial sequence
  >hsa-miR-937-3p MIMAT0004980 Homo sapiens miR-937-3p
auccgcgcucugacucucugcc

SEQ ID NO: 2577 - RNA, 20 nt, Artificial sequence
  >hsa-miR-937-5p MIMAT0022938 Homo sapiens miR-937-5p
gugagucaggguggggcugg

SEQ ID NO: 2578 - RNA, 22 nt, Artificial sequence
  >hsa-miR-938 MIMAT0004981 Homo sapiens miR-938
ugcccuuaaaggugaacccagu

SEQ ID NO: 2579 - RNA, 21 nt, Artificial sequence
  >hsa-miR-939-3p MIMAT0022939 Homo sapiens miR-939-3p
cccugggccucugcuccccag

SEQ ID NO: 2580 - RNA, 24 nt, Artificial sequence
  >hsa-miR-939-5p MIMAT0004982 Homo sapiens miR-939-5p
uggggagcugaggcucugggggug

SEQ ID NO: 2581 - RNA, 21 nt, Artificial sequence
  >hsa-miR-940 MIMAT0004983 Homo sapiens miR-940
aaggcagggcccccgcucccc

SEQ ID NO: 2582 - RNA, 23 nt, Artificial sequence
  >hsa-miR-941 MIMAT0004984 Homo sapiens miR-941
cacccggcugugugcacaugugc

SEQ ID NO: 2583 - RNA, 22 nt, Artificial sequence
  >hsa-miR-942-3p MIMAT0026734 Homo sapiens miR-942-3p
cacauggccgaaacagagaagu

SEQ ID NO: 2584 - RNA, 22 nt, Artificial sequence
  >hsa-miR-942-5p MIMAT0004985 Homo sapiens miR-942-5p
ucuucucuguuuuggccaugug

SEQ ID NO: 2585 - RNA, 21 nt, Artificial sequence
  >hsa-miR-943 MIMAT0004986 Homo sapiens miR-943
cugacuguugccguccuccag

SEQ ID NO: 2586 - RNA, 22 nt, Artificial sequence
  >hsa-miR-944 MIMAT0004987 Homo sapiens miR-944
aaauuauuguacaucggaugag

SEQ ID NO: 2587 - RNA, 22 nt, Artificial sequence
  >hsa-miR-95-3p MIMAT0000094 Homo sapiens miR-95-3p
uucaacggguauuuauugagca

SEQ ID NO: 2588 - RNA, 21 nt, Artificial sequence
  >hsa-miR-95-5p MIMAT0026473 Homo sapiens miR-95-5p
ucaauaaaugucuguugaauu

SEQ ID NO: 2589 - RNA, 19 nt, Artificial sequence
  >hsa-miR-9500 MIMAT0035542 Homo sapiens miR-9500
aagggaagauggugaccac

SEQ ID NO: 2590 - RNA, 22 nt, Artificial sequence
  >hsa-miR-96-3p MIMAT0004510 Homo sapiens miR-96-3p
aaucaugugcagugccaauaug

SEQ ID NO: 2591 - RNA, 23 nt, Artificial sequence
  >hsa-miR-96-5p MIMAT0000095 Homo sapiens miR-96-5p
uuuggcacuagcacauuuuugcu

SEQ ID NO: 2592 - RNA, 22 nt, Artificial sequence
  >hsa-miR-98-3p MIMAT0022842 Homo sapiens miR-98-3p
cuauacaacuuacuacuuuccc

SEQ ID NO: 2593 - RNA, 22 nt, Artificial sequence
  >hsa-miR-98-5p MIMAT0000096 Homo sapiens miR-98-5p
ugagguaguaaguuguauuguu

SEQ ID NO: 2594 - RNA, 22 nt, Artificial sequence
  >hsa-miR-99a-3p MIMAT0004511 Homo sapiens miR-99a-3p
caagcucgcuucuaugggucug

SEQ ID NO: 2595 - RNA, 22 nt, Artificial sequence
  >hsa-miR-99a-5p MIMAT0000097 Homo sapiens miR-99a-5p
aacccguagauccgaucuugug

SEQ ID NO: 2596 - RNA, 22 nt, Artificial sequence
  >hsa-miR-99b-3p MIMAT0004678 Homo sapiens miR-99b-3p
caagcucgugucuguggguccg

SEQ ID NO: 2597 - RNA, 22 nt, Artificial sequence
  >hsa-miR-99b-5p MIMAT0000689 Homo sapiens miR-99b-5p
cacccguagaaccgaccuugcg

SEQ ID NO: 2598 - RNA, 23 nt, Artificial sequence
  Synthetic sequence
ccgguuuucgauuagguuugacu

SEQ ID NO: 2599 - RNA, 23 nt, Artificial sequence
  Drosophila melanogaster bantam/ bantam5p
ccgguuuucgauuugguuugacu

SEQ ID NO: 2600 - RNA, 18 nt, Artificial sequence
  Synthetic sequence
guaggcugccuaggaacg

SEQ ID NO: 2601 - RNA, 101 nt, Artificial sequence
  Synthetic sequence
gggagcguacuucuggguuuacuguugcaauggucaugugaagggagcacgggcguuguguucgccagagaagcuacuugcaguuaaaaauaacaggacac

SEQ ID NO: 2602 - RNA, 23 nt, Artificial sequence
  Synthetic sequence
cggcuuuucgauuugguuugacu

SEQ ID NO: 2603 - RNA, 23 nt, Artificial sequence
  Synthetic sequence
cggcuuaucgauuugguuugacu

SEQ ID NO: 2604 - RNA, 23 nt, Artificial sequence
  Synthetic sequence
gcgguuuucgauuugguuugacu

SEQ ID NO: 2605 - RNA, 23 nt, Artificial sequence
  Synthetic sequence
cggguuuucgauuugguuugacu

SEQ ID NO: 2606 - RNA, 23 nt, Artificial sequence
  Synthetic sequence
cccguuuucgauuugguuugacu

SEQ ID NO: 2607 - RNA, 23 nt, Artificial sequence
  Synthetic sequence
ccgcuuuucgauuugguuugacu

SEQ ID NO: 2608 - RNA, 23 nt, Artificial sequence
  Synthetic sequence
ccggauuucgauuugguuugacu

SEQ ID NO: 2609 - RNA, 24 nt, Artificial sequence
  Drosophila melanogaster miR-263a
aauggcacuggaagaauucacggg

SEQ ID NO: 2610 - RNA, 24 nt, Artificial sequence
  Synthetic sequence
aaacggacuggaagaauucacggg

SEQ ID NO: 2611 - RNA, 21 nt, Artificial sequence
  Drosophila melanogaster miR-1000
auauuguccugucacagcagu

SEQ ID NO: 2612 - RNA, 21 nt, Artificial sequence
  Synthetic sequence
auuaucuccugucacagcagu

SEQ ID NO: 2613 - RNA, 23 nt, Artificial sequence
  Synthetic sequence
ccgguuuucgcuuugguuugacu

SEQ ID NO: 2614 - RNA, 46 nt, Artificial sequence
  Drosophila melanogaster snoR442
cgcaagccuguugggugugauucugcuugucauaguuacucugauc

SEQ ID NO: 2615 - RNA, 24 nt, Artificial sequence
  snoR442 target 5' region
cgcaagccuguugggugugauucu

SEQ ID NO: 2616 - RNA, 22 nt, Artificial sequence
  Synthetic sequence
gcuugucauaguuacucugauc

SEQ ID NO: 2617 - RNA, 23 nt, Artificial sequence
  bantam-3p
ugagaucauuuugaaagcugauu

SEQ ID NO: 2618 - RNA, 128 nt, Artificial sequence
  PNDN-bantam-3p
gggacaccugagugucccaaucagcuuucuuguugaguagagugugagcuccguaacuaguuacaucacgggagauguaacugaaugaaauggugaaggacggguccaaaugaucucaugcuucggca

SEQ ID NO: 2619 - RNA, 129 nt, Artificial sequence
  PNDN-dme-miR-263a
gggacaccugaguguccccccgugaauucuuccuuguugaguagagugugagcuccguaacuaguuacaucacgggagauguaacugaaugaaauggugaaggacggguccaugccauuugcuucggca

SEQ ID NO: 2620 - RNA, 135 nt, Artificial sequence
  PNDN-dme-miR-263a_6nt (PNDN-dme-miR-263a with 6nt in SL3)
gggacaccugaguguccccccgugaauucuuccuuguugaguagagugugagcuccguaacuaguuacaucacgggagauguaacugaaugaaauggugaaggacggguccaugccauuggcugcuucggcagcc

SEQ ID NO: 2621 - RNA, 141 nt, Artificial sequence
  PNDN263a_9nt (PNDN263a with 9nt in SL3)
gggacaccugaguguccccccgugaauucuuccuuguugaguagagugugagcuccguaacuaguuacaucacgggagauguaacugaaugaaauggugaaggacggguccaugccauuguaggcugcuucggcagccuac

SEQ ID NO: 2622 - RNA, 147 nt, Artificial sequence
  PNDN263a_12nt (PNDN263a with 12nt in SL3)
gggacaccugaguguccccccgugaauucuuccuuguugaguagagugugagcuccguaacuaguuacaucacgggagauguaacugaaugaaauggugaaggacggguccaugccauugacguaggcugcuucggcagccuacguc

SEQ ID NO: 2623 - RNA, 128 nt, Artificial sequence
  PNDN-dme-bantam5p
gggacaccugagugucccagucaaaccauuguugaguagagugugagcuccguaacuaguuacaucacgggagauguaacugaaugaaauggugaaggacggguccaucgaaaaccggugcuucggca

SEQ ID NO: 2624 - RNA, 134 nt, Artificial sequence
  PNDN-bantam-5p_6nt (PNDN-bantam-5p with 6nt in SL3)
gggacaccugagugucccagucaaaccauuguugaguagagugugagcuccguaacuaguuacaucacgggagauguaacugaaugaaauggugaaggacggguccaucgaaaaccggggcugcuucggcagcc

SEQ ID NO: 2625 - RNA, 140 nt, Artificial sequence
  PNDNbantam5p_9nt (PNDNbantam5p with 9nt in SL3)
gggacaccugagugucccagucaaaccauuguugaguagagugugagcuccguaacuaguuacaucacgggagauguaacugaaugaaauggugaaggacggguccaucgaaaaccggguaggcugcuucggcagccuac

SEQ ID NO: 2626 - RNA, 146 nt, Artificial sequence
  PNDNbantam5p_12nt (PNDNbantam5p with 12nt SL3)
gggacaccugagugucccagucaaaccauuguugaguagagugugagcuccguaacuaguuacaucacgggagauguaacugaaugaaauggugaaggacggguccaucgaaaaccgggacguaggcugcuucggcagccuacguc

SEQ ID NO: 2627 - RNA, 140 nt, Artificial sequence
  PNDNbantam5p_10nt (PNDNbantam5p with 10nt in SL4)
gggacacuugcugacaagugucccagucaaaccauuguugaguagagugugagcuccguaacuaguuacaucacgggagauguaacugaaugaaauggugaaggacggguccaucgaaaaccggggcugcuucggcagcc

SEQ ID NO: 2628 - RNA, 146 nt, Artificial sequence
  PNDNbantam5p_13nt (PNDNbantam5p with 13nt in SL4)
gggacacuugcagcugacugcaagugucccagucaaaccauuguugaguagagugugagcuccguaacuaguuacaucacgggagauguaacugaaugaaauggugaaggacggguccaucgaaaaccggggcugcuucggcagcc

SEQ ID NO: 2629 - RNA, 126 nt, Artificial sequence
  PNDN-dme-miR-1000
gggacaccugagugucccacugcuguguuguugaguagagugugagcuccguaacuaguuacaucacgggagauguaacugaaugaaauggugaaggacggguccaaggacaauauugcuucggca

SEQ ID NO: 2630 - RNA, 132 nt, Artificial sequence
  PNDN-dme-miR-1000_6nt (PNDN-dme-miR-1000 with 6nt in SL3)
gggacaccugagugucccacugcuguguuguugaguagagugugagcuccguaacuaguuacaucacgggagauguaacugaaugaaauggugaaggacggguccaaggacaauauggcugcuucggcagcc

SEQ ID NO: 2631 - RNA, 138 nt, Artificial sequence
  PNDN1000_9nt (PNDN1000 with 9nt in SL3)
gggacaccugagugucccacugcuguguuguugaguagagugugagcuccguaacuaguuacaucacgggagauguaacugaaugaaauggugaaggacggguccaaggacaauauguaggcugcuucggcagccuac

SEQ ID NO: 2632 - RNA, 144 nt, Artificial sequence
  PNDN1000_12nt (PNDN1000 with 12nt in SL3)
gggacaccugagugucccacugcuguguuguugaguagagugugagcuccguaacuaguuacaucacgggagauguaacugaaugaaauggugaaggacggguccaaggacaauaugacguaggcugcuucggcagccuacguc

SEQ ID NO: 2633 - RNA, 24 nt, Artificial sequence
  hsa_miR-21-5p
guagcuuaucagacugauguugac

SEQ ID NO: 2634 - RNA, 129 nt, Artificial sequence
  PNDN-hsa-miR21-5p
gggacaccugagugucccgucaacaucuuguugaguagagugugagcuccguaacuaguuacaucacgggagauguaacugaaugaaauggugaaggacggguccaucugauaagcuacugcuucggca

SEQ ID NO: 2635 - RNA, 21 nt, Artificial sequence
  hsa_miR-375
uuuguucguucggcucgcgug

SEQ ID NO: 2636 - RNA, 126 nt, Artificial sequence
  PNDN-hsa_miR-375
gggacaccugaguguccccacgcgagccguuguugaguagagugugagcuccguaacuaguuacaucacgggagauguaacugaaugaaauggugaaggacggguccacgaacaaaugcuucggca

SEQ ID NO: 2637 - RNA, 22 nt, Artificial sequence
  hsa_miR-223-3p
gucaguuugucaaauaccccaa

SEQ ID NO: 2638 - RNA, 127 nt, Artificial sequence
  PNDN-hsa_miR-223-3p
gggacaccugagugucccuugggguauuuguuguugaguagagugugagcuccguaacuaguuacaucacgggagauguaacugaaugaaauggugaaggacggguccaaaacugacugcuucggca

SEQ ID NO: 2639 - RNA, 23 nt, Artificial sequence
  hsa_miR-223-5p
cguguauuugacaagcugaguug

SEQ ID NO: 2640 - RNA, 128 nt, Artificial sequence
  PNDN-hsa_miR-223-5p
gggacaccugaguguccccaacucagcuugucuuguugaguagagugugagcuccguaacuaguuacaucacgggagauguaacugaaugaaauggugaaggacggguccaauacacgugcuucggca

SEQ ID NO: 2641 - RNA, 127 nt, Artificial sequence
  PNDN-hsa_miR-122
gggacaccugaguguccccaaacaccuuguugaguagagugugagcuccguaacuaguuacaucacgggagauguaacugaaugaaauggugaaggacggguccaugucacacuccaugcuucggca

SEQ ID NO: 2642 - RNA, 24 nt, Artificial sequence
  hsa_let7f
ugagguaguagauuguauaguugu

SEQ ID NO: 2643 - RNA, 129 nt, Artificial sequence
  PNDN-hsa_let7f
gggacaccugagugucccacaacuauacauuguugaguagagugugagcuccguaacuaguuacaucacgggagauguaacugaaugaaauggugaaggacggguccacuacuaccucaugcuucggca

SEQ ID NO: 2644 - RNA, 22 nt, Artificial sequence
  dme-miR-124
uaaggcacgcggugaaugccaa

SEQ ID NO: 2645 - RNA, 155 nt, Artificial sequence
  PNDN-dme-miR-124
gggacaccugagugucccuuggcauucuuguugaguagagugugagcuccguaacuaguuacaucacgggagauguaacugaaugaaauggugaaggacggguccacgcgugccuuaggcugcuucggcagccuaaggcacgcggugaaugccaa

SEQ ID NO: 2646 - RNA, 22 nt, Artificial sequence
  dme-miR-14
ucagucuuuuucucucuccuau

SEQ ID NO: 2647 - RNA, 155 nt, Artificial sequence
  PNDN-dme-miR-14
gggacaccugagugucccauaggagagaguuguugaguagagugugagcuccguaacuaguuacaucacgggagauguaacugaaugaaauggugaaggacggguccaaaagacugaggcugcuucggcagccucagucuuuuucucucuccuau

SEQ ID NO: 2648 - RNA, 22 nt, Artificial sequence
  dme-miR-184
uggacggagaacugauaagggc

SEQ ID NO: 2649 - RNA, 133 nt, Artificial sequence
  PNDN-dme-miR-184
gggacaccugagugucccgcccuuaucuuguugaguagagugugagcuccguaacuaguuacaucacgggagauguaacugaaugaaauggugaaggacggguccauucuccguccaggcugcuucggcagcc

SEQ ID NO: 2650 - RNA, 22 nt, Artificial sequence
  dme-miR-252
cuaaguacuagugccgcaggag

SEQ ID NO: 2651 - RNA, 133 nt, Artificial sequence
  PNDN-dme-miR-252
gggacaccugaguguccccuccugcggcuuguugaguagagugugagcuccguaacuaguuacaucacgggagauguaacugaaugaaauggugaaggacggguccauaguacuuagggcugcuucggcagcc

SEQ ID NO: 2652 - RNA, 128 nt, Artificial sequence
  PNDN_snoR442_5
gggacaccugagugucccgaaucacacccuuguugaguagagugugagcuccguaacuaguuacaucacgggagauguaacugaaugaaauggugaaggacggguccacaggcuugcgugcuucggca

SEQ ID NO: 2653 - RNA, 23 nt, Artificial sequence
  snoR442 target 3' region
ugcuugucauaguuacucugauc

SEQ ID NO: 2654 - RNA, 128 nt, Artificial sequence
  PNDN_snoR442_3
gggacaccugagugucccgaucagaguauuguugaguagagugugagcuccguaacuaguuacaucacgggagauguaacugaaugaaauggugaaggacggguccauaugacaagcaugcuucggca

SEQ ID NO: 2655 - RNA, 23 nt, Artificial sequence
  Synthetic sequence
ugagaucauuuggaaagcugauu

SEQ ID NO: 2656 - RNA, 23 nt, Artificial sequence
  Synthetic sequence
ugagaucauuucgaaagcugauu

SEQ ID NO: 2657 - RNA, 23 nt, Artificial sequence
  Synthetic sequence
ugagaucauuuagaaagcugauu

SEQ ID NO: 2658 - RNA, 79 nt, Artificial Sequence
  Synthetic sequence
  misc_feature (79)..(79): (n) is any naturally occurring nucleotide; wherein (n) is a sequence complementary to the target RNA; wherein this (n) is attached to SEQ ID NO 2659
uuguugaguagagugugagcuccguaacuaguuacaucacgggagauguaacugaaugaaauggugaaggacggguccn

SEQ ID NO: 2659 - RNA, 16 nt, Artificial Sequence
  Synthetic sequence
ggcugcuucggcagcc
